(19) United States
(12) Patent Application Publication
(10) Pub. No.: US 2017/0275382 A1
(43) Pub. Date: Sep. 28, 2017

(54) MULTIVALENT CD20-BINDING MOLECULE COMPRISING SHIGA TOXIN A SUBUNIT EFFECTOR POLYPEPTIDES AND ENRICHED COMPOSITIONS THEREFOF

(71) Applicant: MOLECULAR TEMPLATES, INC., Georgetown, TX (US)

(72) Inventors: Eric Poma, New York, NY (US); Erin Willert, Round Rock, TX (US); Jason Kim, Austin, TX (US); Jack Higgins, Georgetown, TX (US); Jensing Liu, Round Rock, TX (US); Rodney Flores-Lefranc, Round Rock, TX (US)

(73) Assignee: Molecular Templates, Inc., Georgetown, TX (US)

(21) Appl. No.: 15/290,266

(22) Filed: Oct. 11, 2016

Related U.S. Application Data
(63) Continuation-in-part of application No. PCT/US2016/016580, filed on Feb. 4, 2016.
(60) Provisional application No. 62/249,193, filed on Oct. 31, 2015.

(51) Int. Cl. C07K 19/00; A61K 38/17; C07K 14/25; C07K 16/28; C07K 16/18; A61K 38/16; A61K 39/00

(52) U.S. Cl. CPC C07K 19/00; A61K 38/164; A61K 38/1764; A61K 38/177; A61K 39/0011; C07K 16/28; C07K 16/2887; C07K 16/18; C07K 14/25; C07K 2317/569; C07K 2317/622

(57) ABSTRACT

The present invention provides multivalent CD20-binding molecules, and compositions thereof, such as enriched compositions comprising large proportions of multivalent CD20-binding molecule relative to monovalent CD20-binding molecule. Certain multivalent CD20-binding molecules of the present invention comprise 1) two or more CD20 binding regions and 2) one or more Shiga toxin effector polypeptide regions derived from an A Subunit of a member of the Shiga toxin family. Certain multivalent CD20-binding molecules of the present invention, and compositions thereof, have uses for selective killing specific cell types and as therapeutics for the treatment of a variety of diseases, including cancers, tumors, and immune disorders. Certain multivalent CD20-binding molecules of the present invention, and compositions thereof, have uses for delivering agents into CD20-expressing cells, including for the intracellular labeling of CD20-expressing cells, collecting diagnostic information, and monitoring the treatment of variety diseases, such as cancers, tumors, and immune disorders which involve CD20-expressing cells.

### SEQUENCE LISTING

[0001] The instant application contains a Sequence Listing which has been submitted electronically in ASCII format and is hereby incorporated by reference in its entirety. Said ASCII copy, created on Jun. 9, 2017, is named 15-01PCT-CIP_SL.txt and is 1,248,516 bytes in size.

### FIELD OF THE INVENTION

[0002] The present invention relates to multivalent CD20-binding molecules comprising multiple CD20-binding regions and optionally one or more toxin effector regions, such as, e.g., a Shiga toxin effector region derived from the A Subunit of a member(s) of the Shiga toxin family, and compositions enriched with one or more of the aforementioned molecules. The multivalent CD20-binding molecules of the present invention, and compositions thereof, have uses, e.g., for the selective killing of CD20-expressing cells and as therapeutics for the treatment of a variety of diseases, disorders, and conditions, which include cancers, tumors, and/or immune disorders.

### BACKGROUND

[0003] The development of synthetic fusion proteins from toxins that are effective as therapeutics has challenged scientists for decades (Pastan I et al., Annu Rev Med 58: 221-37 (2007)). The potency of recombinant cytotoxic proteins derived from toxins depends on each protein's efficiency in various cellular processes, including receptor internalization, intracellular routing, and delivering an enzymatically active, toxin moiety to cytosolic, target substrates in order to efficiently target and kill cells (Du X et al., Cancer Res 68: 6300-5 (2008); Pirie C et al., J Biol Chem 286: 4165-72 (2011)).

[0004] Naturally occurring toxins or truncated toxin fragments have been linked or fused to immunoglobulin domains or receptor ligands through chemical conjugation or recombinant protein engineering techniques with the hope of creating cell-targeted therapeutic molecules (Moolten F, Cooperband S, Science 169: 68-70 (1970); Thorpe P et al., Nature 271: 752-5 (1978); Krolick K et al., Proc Natl Acad Sci USA 77: 5419-23 (1980); Krolick K et al., Cancer Immunol Immunother 12: 39-41 (1981); Blythman H et al., Nature 290: 145-46 (1981); Chaudhary V et al., Nature 339: 394-7 (1989); Strom T et al., Semin Immunol 2: 467-79 (1990); Pastan I et al., Annu Rev Biochem 61: 331-54 (1992); Foss F et al., Curr Top Microbiol Immunol 234: 63-81 (1998)). The aim of such molecular engineering techniques is to design chimeric molecules with the dual functionality of: 1) delivering toxins to specific cell types or places within an organism after systemic administration; and 2) effectuating a targeted cytotoxicity to specific cells using potent cytotoxicity mechanisms effective in eukaryotic cells.

[0005] There is an unsolved problem in targeting extracellular CD20 antigens with therapeutics that require cell internalization for efficacy—how to efficiently drive the therapeutic agents bound to cell surface CD20 molecules inside target cells. CD20 is a particularly attractive target for antibody-based therapies based on mechanisms in which it is desirable for a therapeutic agent to remain on the cell surface because CD20 does not internalize after being bound by antibodies. Although the lack of CD20 internalization was later proven to be both cell type- and antibody type-specific, in general, CD20 appears to internalize at a much lower rate than do other cell surface antigens and is generally considered a non-internalizing, extracellular target. CD20 is “resistant to internalization and remains on the cell surface with its bound mAb for extended periods of hours and perhaps days” (Glennie M et al., Mol Immunol 44: 3823-37 (2007); see e.g. Press O et al., Cancer Res 49: 4906-12 (1989); McLaughlin P et al., J Clin Oncol 16: 2825-33 (1998); Johnson P, Glennie M, Semin Oncol 30: 3-8 (2003)).

[0006] Although antibody-based therapies targeting extracellular CD20 antigens are numerous, they are thus commonly based on extracellular mechanisms (see Cheson B, Leonard J, N Engl J Med 359: 613-26 (2008); Boross P, Leusen J, Am J Cancer Res 2: 676-90 (2012)). There is a question in the art as to the utility of CD20 as an extracellular target for therapies whose effectiveness requires a therapeutic agent to reach an intracellular space of a target cell in a CD20-mediated fashion because of the general finding that CD20 does not readily internalize.

[0007] The effectiveness of therapies relying on cellular internalization of a therapeutic, such as, e.g., immunotoxins, ligand-toxin fusions, and immuno-RNases, depends on both the quantity of their target on the surface of target cells and the rate of cellular internalization of a surface-bound therapeutic complexed with its target. For CD20 in particular, there is an unsolved problem in targeting extracellular CD20 with internalizing therapeutics—how to efficiently drive therapeutic agents bound to cell-surface CD20 molecules into the interior of target cells. The general resistance of CD20 to cellular internalization means that this unsolved problem of promoting efficient CD20 internalization applies generally to any CD20-expressing target cell, including cells that express relatively large quantities of CD20 on their cellular surfaces.

[0008] There is a need in the art to develop effective compositions, therapeutic molecules, and therapeutic methods which target cells expressing cell-surface CD20 where CD20 does not efficiently internalize upon therapeutic binding, such as, e.g., by an immunoglobulin binding domain. In particular, there is a need in the art to develop CD20-targeted molecules that trigger rapid and efficient cellular internalization of cell-surface CD20 molecules. For example, immunotoxins which actively induce cellular internalization of cell-surface expressed CD20 molecules, which intracellularly route toxin components to their targets, and which are capable of potently killing CD20-expressing cells are desirable for the development of effective CD20-targeted, anti-neoplastic and immuno-modulatory therapeutics. Such cell-targeted therapies may be used for the targeted killing of CD20-expressing cells, such as, e.g., certain malignant cells, B-lymphocytes (B-cells), and T-lymphocytes (T-cells). New therapies are especially needed for patients who are insensitive or develop resistance to current CD20-targeted therapies relying on extracellular mechanisms, such as, e.g., immune mechanisms based on signaling function(s) of an immunoglobulin domain like a fragment crystallizable Fc region (Fc region) interaction(s) with a Fc receptor(s) or the complement system.

[0009] There accordingly remains a need in the art for CD20-binding molecules which exhibit efficient and effective cellular internalization, intracellular-routing, and/or potent cytotoxicity toward CD20-expressing cells. In particular, there is a need in the art to develop effective compositions, therapeutics, and therapeutic methods targeting cell-surface CD20 antigens which do not naturally internalize at an efficient rate or upon binding by a therapeutic agent. In addition, it would be desirable to have improved, cell-targeting molecules which comprise Shiga-toxin-Subunit-A derived polypeptides that self-direct their own cellular internalization, intracellular routing, and/or display potent cytotoxicity for killing specific CD20-expressing cell types and for use in therapies for the treatment of a variety of diseases, such as, e.g., cancers, tumors, and immune disorders that can be treated by the selective killing of, or the selective delivery of an agent into, a targeted, CD20-expressing cell type.

### SUMMARY

[0010] The present invention provides various embodiments of multivalent CD20-binding molecules, and compositions thereof, wherein each multivalent CD20-binding molecule comprises 1) two or more CD20 binding regions, such as a binding region derived from an immunoglobulin, and 2) at least one Shiga toxin A Subunit effector polypeptide region derived from the A Subunit of at least one member of the Shiga toxin family. The CD20 binding regions of the multivalent CD20-binding molecules of the present invention are each, on its own, capable of specifically binding an extracellular part of a CD20, such as, e.g., a part of a CD20 exposed to the extracellular environment when CD20 is expressed at a cellular surface by a cell and remains physically coupled to the cell.

[0011] The linking of multiple CD20 binding regions with one or more Shiga toxin A Subunit-derived polypeptides enables the engineering of CD20-targeting molecules that can promote rapid cellular internalization of cell-surface CD20 and thus efficiently enter the interiors of CD20-expressing cells. Therefore, certain multivalent CD20-binding molecules of the present invention, and compositions thereof, may be used to selectively deliver cargo(s) to a CD20-expressing cell type(s) in the presence of one or more other cell types based on its CD20-targeting and cellular internalization activity(ies), such as, e.g., a cargo having a desired, intracellular function. In addition, certain multivalent CD20-binding molecules of the present invention, and compositions thereof, may be used to selectively kill a CD20-expressing cell in the presence of one or more other cell types based on its CD20-targeting activity and cellular internalization activity(ies), such as, e.g., by delivering into the interior of the targeted, CD20-expressing cell a component of the multivalent CD20-binding molecule which is cytotoxic at an intracellular location. For example, certain multivalent CD20-binding molecules of the present invention may be potently cytotoxic to CD20-expressing cells via their abilities to efficiently deliver into the interior of a CD20-expressing cell a catalytically active, Shiga toxin effector polypeptide(s) that is able to effectively route to the cytosol.

[0012] In certain embodiments, the multivalent CD20-binding molecule of the present invention comprises (1) two or more CD20 binding regions, each capable of specifically binding an extracellular part of a CD20 molecule; and (2) one or more Shiga toxin effector polypeptides derived from the amino acid sequence of the A Subunit of at least one member of the Shiga toxin family. In certain further embodiments, the multivalent CD20-binding molecule of the present invention does not comprise an immunoglobulin Fc region or any immunoglobulin domain required for an extracellular mechanism(s) of cell killing other than a domain(s) required for antigen binding. In certain further embodiments, the multivalent CD20-binding molecule does not comprise any immunoglobulin domains other than (1) six or more CDRs or (2) one or more single-chain variable fragments. In certain embodiments, the multivalent CD20-binding molecule of the present invention comprises only two, Shiga toxin effector polypeptides.

[0013] In certain embodiments, the multivalent CD20-binding molecule of the present invention comprises (1) two or more CD20 binding regions, each capable of specifically binding an extracellular part of a CD20 molecule; and (2) one or more Shiga toxin effector regions, each comprising a polypeptide derived from the amino acid sequence of the A Subunit of at least one member of the Shiga toxin family. In certain embodiments, the multivalent CD20-binding molecule of the present invention comprises (1) two or more CD20 binding regions, each capable on its own of specifically binding an extracellular part of a CD20 molecule; and (2) one or more Shiga toxin effector regions, each comprising a polypeptide derived from the amino acid sequence of the A Subunit of at least one member of the Shiga toxin family. In certain further embodiments, the multivalent CD20-binding molecule of the present invention does not comprise an immunoglobulin Fc region or any immunoglobulin domain required for an extracellular mechanism(s) of cell killing other than a domain(s) required for antigen binding. In certain further embodiments, the multivalent CD20-binding molecule does not comprise any immunoglobulin domains other than (1) six or more CDRs or (2) one or more single-chain variable fragments. In certain embodiments, the multivalent CD20-binding molecule of the present invention comprises only two, Shiga toxin effector regions.

[0014] For certain embodiments of the multivalent CD20-binding molecule of the present invention, upon administration of the multivalent CD20-binding molecule to a cell physically coupled with CD20, which have the extracellular part bound by two or more CD20 binding regions of the multivalent CD20-binding molecule, results in one or more of the following: (1) internalizing the multivalent CD20-binding molecule inside the cell, (2) subcellular routing of a Shiga toxin effector polypeptide of the multivalent CD20-binding molecule to the cell's cytosol, (3) disrupting the cell's ribosome function, and (4) killing of the cell. For certain further embodiments, the internalizing occurs in about five hours, four hours, three hours, two hours, one hour, thirty minutes, or less at a physiological temperature appropriate for the cell and/or at about 37 degrees Celsius. For certain further embodiments, the multivalent CD20-binding molecule induces cellular internalization of a molecular complex comprising the multivalent CD20-binding molecule bound to CD20. For certain further embodiments, the cell expresses at a cellular surface the CD20 which (1) have the extracellular part bound by the two or more CD20 binding regions of the multivalent CD20-binding molecule, (2) have a transmembrane domain, and (3) remain physically coupled to the cell. For certain further embodiments, the cell is a CD20 positive cell. For certain embodiments, the cell is physically coupled with a significant amount of extracellular CD20 which (1) have the extracellular part bound by the two or more CD20 binding regions of the multivalent CD20-binding molecule. For certain embodiments, the cell is a descendant or member of a B-cell lineage. For certain embodiments, the cell is selected from the group consisting of: malignant B-cell, B-cell leukemia cell, B-cell lymphoma cell, B-cell myeloma cell, acute myeloid leukemia cell, acute non-lymphocytic leukemia cell, B-cell chronic lymphocytic leukemia cell, B-cell lymphoma cell, B-cell non-Hodgkin's lymphoma cell, B-cell precursor acute lymphoblastic leukemia cell, B-cell prolymphocytic leukemia cell, Burkitt's lymphoma cell, chronic lymphocytic leukemia cell, chronic myeloid leukemia cell, diffuse large B-cell lymphoma cell, follicular lymphoma cell, hairy cell leukemia cell, Hodgkin's lymphoma cell, immunoblastic large cell lymphoma cell, mantle cell lymphoma cell, melanoma cell, multiple myeloma cell, neoplastic plasma cell, nodular lymphocyte predominant Hodgkin's lymphoma cell, non-Hodgkin's lymphoma cell, plasmablastic lymphoma cell, plasma cell myeloma cell, precursor B-lymphoblastic lymphoma cell, small lymphocytic lymphoma cell, malignant T-cell, T-cell leukemia cell, T-cell lymphoma cell, T-cell large granular lymphocyte leukemia cell, T-cell prolymphocytic leukemia, healthy B-cell lineage cell, and/or healthy T-cell.

[0015] For certain embodiments of the multivalent CD20-binding molecule of the present invention, upon administration of the multivalent CD20-binding molecule to a cell physically coupled with CD20, which have the extracellular part bound by two or more CD20 binding regions of the multivalent CD20-binding molecule, results in one or more of the following: (1) internalizing the multivalent CD20-binding molecule inside the cell, (2) subcellular routing of a Shiga toxin effector region of the multivalent CD20-binding molecule to the cell's cytosol, (3) disrupting the cell's ribosome function, and (4) killing of the cell. For certain further embodiments, the internalizing occurs in about five hours, four hours, three hours, two hours, one hour, thirty minutes, or less at a physiological temperature appropriate for the cell and/or at about 37 degrees Celsius. For certain further embodiments, the multivalent CD20-binding molecule induces cellular internalization of a molecular complex comprising the multivalent CD20-binding molecule bound to CD20. For certain further embodiments, the cell expresses at a cellular surface the CD20 which (1) have the extracellular part bound by the two or more CD20 binding regions of the multivalent CD20-binding molecule, (2) have a transmembrane domain, and (3) remain physically coupled to the cell. For certain further embodiments, the cell is a CD20 positive cell. For certain embodiments, the cell is physically coupled with a significant amount of extracellular CD20 which (1) have the extracellular part bound by the two or more CD20 binding regions of the multivalent CD20-binding molecule. For certain embodiments, the cell is a descendant or member of a B-cell lineage. For certain embodiments, the cell is selected from the group consisting of: malignant B-cell, B-cell leukemia cell, B-cell lymphoma cell, B-cell myeloma cell, acute myeloid leukemia cell, acute non-lymphocytic leukemia cell, B-cell chronic lymphocytic leukemia cell, B-cell lymphoma cell, B-cell non-Hodgkin's lymphoma cell, B-cell precursor acute lymphoblastic leukemia cell, B-cell prolymphocytic leukemia cell, Burkitt's lymphoma cell, chronic lymphocytic leukemia cell, chronic myeloid leukemia cell, diffuse large B-cell lymphoma cell, follicular lymphoma cell, hairy cell leukemia cell, Hodgkin's lymphoma cell, immunoblastic large cell lymphoma cell, mantle cell lymphoma cell, melanoma cell, multiple myeloma cell, neoplastic plasma cell, nodular lymphocyte predominant Hodgkin's lymphoma cell, non-Hodgkin's lymphoma cell, plasmablastic lymphoma cell, plasma cell myeloma cell, precursor B-lymphoblastic lymphoma cell, small lymphocytic lymphoma cell, malignant T-cell, T-cell leukemia cell, T-cell lymphoma cell, T-cell large granular lymphocyte leukemia cell, T-cell prolymphocytic leukemia, healthy B-cell lineage cell, and/or healthy T-cell.

[0016] For certain embodiments of the multivalent CD20-binding molecule of the present invention, upon administration of the multivalent CD20-binding molecule to a plurality of cells physically coupled with CD20, which have the extracellular part bound by two or more CD20 binding regions of the multivalent CD20-binding molecule, results in one or more of the following activities: (1) internalizing the multivalent CD20-binding molecule inside the cell, (2) subcellular routing of a Shiga toxin effector polypeptide of the multivalent CD20-binding molecule to the cell's cytosol, (3) disrupting the cell's ribosome function, and (4) killing of the cell. For certain further embodiments, the multivalent CD20-binding molecule induces cellular internalization of a molecular complex comprising the multivalent CD20-binding molecule bound to CD20. For certain further embodiments, upon administration of the multivalent CD20-binding molecule to a plurality of cells physically coupled with CD20, which have the extracellular part bound by two or more CD20 binding regions of the multivalent CD20-binding molecule, at a concentration of multivalent CD20-binding molecule equivalent to five or thirty-eight percent to fifty percent cell-surface occupancy, the majority of the multivalent CD20-binding molecule internalizes into the plurality of cells in about five hours, four hours, three hours, two hours, one hour, thirty minutes, or less at a physiological temperature appropriate for the cell and/or at about 37 degrees Celsius. For certain further embodiments, members of the plurality of cells express at a cellular surface the CD20 which (1) have the extracellular part bound by the two or more CD20 binding regions of the multivalent CD20-binding molecule, (2) have a transmembrane domain, and (3) remain physically coupled to the cell. For certain further embodiments, members of the plurality of cells are CD20 positive cells. For certain embodiments, the members of the plurality of cells are physically coupled with a significant amount of extracellular CD20 which (1) have the extracellular part bound by the two or more CD20 binding regions of the multivalent CD20-binding molecule. For certain embodiments, members of the plurality of cells are descendants or members of a B-cell lineage. For certain embodiments, members of the plurality of cells are selected from the group consisting of: malignant B-cell, B-cell leukemia cell, B-cell lymphoma cell, B-cell myeloma cell, acute myeloid leukemia cell, acute non-lymphocytic leukemia cell, B-cell chronic lymphocytic leukemia cell, B-cell lymphoma cell, B-cell non-Hodgkin's lymphoma cell, B-cell precursor acute lymphoblastic leukemia cell, B-cell prolymphocytic leukemia cell, Burkitt's lymphoma cell, chronic lymphocytic leukemia cell, chronic myeloid leukemia cell, diffuse large B-cell lymphoma cell, follicular lymphoma cell, hairy cell leukemia cell, Hodgkin's lymphoma cell, immunoblastic large cell lymphoma cell, mantle cell lymphoma cell, melanoma cell, multiple myeloma cell, neoplastic plasma cell, nodular lymphocyte predominant Hodgkin's lymphoma cell, non-Hodgkin's lymphoma cell, plasmablastic lymphoma cell, plasma cell myeloma cell, precursor B-lymphoblastic lymphoma cell, small lymphocytic lymphoma cell, malignant T-cell, T-cell leukemia cell, T-cell lymphoma cell, T-cell large granular lymphocyte leukemia cell, T-cell prolymphocytic leukemia, healthy B-cell lineage cell, and/or healthy T-cell.

[0017] For certain embodiments of the multivalent CD20-binding molecule of the present invention, upon administration of the multivalent CD20-binding molecule to a plurality of cells physically coupled with CD20, which have the extracellular part bound by two or more CD20 binding regions of the multivalent CD20-binding molecule, results in one or more of the following activities: (1) internalizing the multivalent CD20-binding molecule inside the cell, (2) subcellular routing of a Shiga toxin effector region of the multivalent CD20-binding molecule to the cell's cytosol, (3) disrupting the cell's ribosome function, and (4) killing of the cell. For certain further embodiments, the multivalent CD20-binding molecule induces cellular internalization of a molecular complex comprising the multivalent CD20-binding molecule bound to CD20. For certain further embodiments, upon administration of the multivalent CD20-binding molecule to a plurality of cells physically coupled with CD20, which have the extracellular part bound by two or more CD20 binding regions of the multivalent CD20-binding molecule, at a concentration of multivalent CD20-binding molecule equivalent to five or thirty-eight percent to fifty percent cell-surface occupancy, the majority of the multivalent CD20-binding molecule internalizes into the plurality of cells in about five hours, four hours, three hours, two hours, one hour, thirty minutes, or less at a physiological temperature appropriate for the cell and/or at about 37 degrees Celsius. For certain further embodiments, members of the plurality of cells express at a cellular surface the CD20 which (1) have the extracellular part bound by the two or more CD20 binding regions of the multivalent CD20-binding molecule, (2) have a transmembrane domain, and (3) remain physically coupled to the cell. For certain further embodiments, members of the plurality of cells are CD20 positive cells. For certain embodiments, the members of the plurality of cells are physically coupled with a significant amount of extracellular CD20 which (1) have the extracellular part bound by the two or more CD20 binding regions of the multivalent CD20-binding molecule. For certain embodiments, members of the plurality of cells are descendants or members of a B-cell lineage. For certain embodiments, members of the plurality of cells are selected from the group consisting of: malignant B-cell, B-cell leukemia cell, B-cell lymphoma cell, B-cell myeloma cell, acute myeloid leukemia cell, acute non-lymphocytic leukemia cell, B-cell chronic lymphocytic leukemia cell, B-cell lymphoma cell, B-cell non-Hodgkin's lymphoma cell, B-cell precursor acute lymphoblastic leukemia cell, B-cell prolymphocytic leukemia cell, Burkitt's lymphoma cell, chronic lymphocytic leukemia cell, chronic myeloid leukemia cell, diffuse large B-cell lymphoma cell, follicular lymphoma cell, hairy cell leukemia cell, Hodgkin's lymphoma cell, immunoblastic large cell lymphoma cell, mantle cell lymphoma cell, melanoma cell, multiple myeloma cell, neoplastic plasma cell, nodular lymphocyte predominant Hodgkin's lymphoma cell, non-Hodgkin's lymphoma cell, plasmablastic lymphoma cell, plasma cell myeloma cell, precursor B-lymphoblastic lymphoma cell, small lymphocytic lymphoma cell, malignant T-cell, T-cell leukemia cell, T-cell lymphoma cell, T-cell large granular lymphocyte leukemia cell, T-cell prolymphocytic leukemia, healthy B-cell lineage cell, and/or healthy T-cell.

[0018] For certain embodiments of the multivalent CD20-binding molecule of the present invention, administration of the multivalent CD20-binding molecule to a CD20-expressing cell, the multivalent CD20-binding molecule is capable of causing death of the cell, i.e. killing the cell. For certain embodiments of the multivalent CD20-binding molecule of the present invention, upon administration of the multivalent CD20-binding molecule to a CD20-expressing cell expressing CD20 having the extracellular part bound by two or more CD20 binding regions of the multivalent CD20-binding molecule, the multivalent CD20-binding molecule is capable of causing death of the cell. For certain further embodiments, the cell express at a cellular surface the CD20 which (1) have the extracellular part bound by the two or more CD20 binding regions of the multivalent CD20-binding molecule, (2) have a transmembrane domain, and (3) remain physically coupled to the cell. For certain further embodiments, the cell is a CD20 positive cell. For certain further embodiments, the cell is physically coupled with a significant amount of extracellular CD20 which (1) have the extracellular part bound by the two or more CD20 binding regions of the multivalent CD20-binding molecule. This cell killing activity may or may not depend on the catalytic activity of one or more Shiga toxin effector regions (e.g. Shiga toxin effector polypeptides) of the multivalent CD20-binding molecule.

[0019] For certain embodiments of the multivalent CD20-binding molecule of the present invention, upon administration of the multivalent CD20-binding molecule to a first population of cells physically coupled to CD20, and a second population of cells, a cytotoxic effect of the multivalent CD20-binding molecule to members of said first population of cells relative to members of said second population of cells is at least 3-fold greater. For certain further embodiments, members of the first population of cells express at a cellular surface the CD20 which (1) have the extracellular part bound by the two or more CD20 binding regions of the multivalent CD20-binding molecule, (2) have a transmembrane domain, and (3) remain physically coupled to the cell. For certain further embodiments, members of the first population of cells are CD20 positive cells. For certain embodiments, the members of the first population of cells are physically coupled with a significant amount of extracellular CD20 which (1) have the extracellular part bound by the two or more CD20 binding regions of the multivalent CD20-binding molecule. For certain embodiments, members of the first population of cells over-express, at a cellular surface, CD20 which have the extracellular part bound by the two or more CD20 binding regions of the multivalent CD20-binding molecule. For certain embodiments, members of the first population of cells over-express CD20 which (1) have the extracellular part bound by the two or more CD20 binding regions of the multivalent CD20-binding molecule, (2) have a transmembrane domain, and (3) remain physically coupled to the cell. For certain embodiments, members of the first population of cells are descendants or members of a B-cell lineage. For certain embodiments, members of the first population of cells are selected from the group consisting of: malignant B-cell, B-cell leukemia cell, B-cell lymphoma cell, B-cell myeloma cell, acute myeloid leukemia cell, acute non-lymphocytic leukemia cell, B-cell chronic lymphocytic leukemia cell, B-cell lymphoma cell, B-cell non-Hodgkin's lymphoma cell, B-cell precursor acute lymphoblastic leukemia cell, B-cell prolymphocytic leukemia cell, Burkitt's lymphoma cell, chronic lymphocytic leukemia cell, chronic myeloid leukemia cell, diffuse large B-cell lymphoma cell, follicular lymphoma cell, hairy cell leukemia cell, Hodgkin's lymphoma cell, immunoblastic large cell lymphoma cell, mantle cell lymphoma cell, melanoma cell, multiple myeloma cell, neoplastic plasma cell, nodular lymphocyte predominant Hodgkin's lymphoma cell, non-Hodgkin's lymphoma cell, plasmablastic lymphoma cell, plasma cell myeloma cell, precursor B-lymphoblastic lymphoma cell, small lymphocytic lymphoma cell, malignant T-cell, T-cell leukemia cell, T-cell lymphoma cell, T-cell large granular lymphocyte leukemia cell, T-cell prolymphocytic leukemia, healthy B-cell lineage cell, and/or healthy T-cell. For certain embodiments, the members of the second population of cells are not physically coupled with extracellular CD20 and/or are CD20 negative. For certain embodiments, the members of the second population of cells are not physically coupled with extracellular CD20 which (1) have the extracellular part bound by the two or more CD20 binding regions of the multivalent CD20-binding molecule. For certain further embodiments, members of the second population of cells express at a cellular surface the CD20 which (1) have the extracellular part bound by the two or more CD20 binding regions of the multivalent CD20-binding molecule, (2) have a transmembrane domain, and (3) remain physically coupled to the cell. For certain embodiments, the members of the second population of cells are not physically coupled with a significant amount of extracellular CD20 which (1) have the extracellular part bound by the two or more CD20 binding regions of the multivalent CD20-binding molecule. For certain embodiments of the multivalent CD20-binding molecule of the present invention, upon administration of the multivalent CD20-binding molecule to a first population of cells whose members are CD20 positive, and a second population of cells whose members are not CD20 positive, a cytotoxic effect of the multivalent CD20-binding molecule to members of said first population of cells relative to members of said second population of cells is at least 3-fold greater.

[0020] In certain embodiments, the multivalent CD20-binding molecule of the present invention comprises two or more proteinaceous components (e.g. protein subunits), wherein each proteinaceous component comprises (1) at least one CD20 binding region capable of specifically binding an extracellular part of a CD20 molecule, and, optionally, (2) one or more Shiga toxin effector polypeptides, each comprising a polypeptide derived from the amino acid sequence of the A Subunit of at least one member of the Shiga toxin family. In certain further embodiments, each proteinaceous component comprises (1) only one CD20 binding region capable of specifically binding an extracellular part of a CD20 molecule, and (2) only one Shiga toxin effector polypeptide. In certain further embodiments, the multivalent CD20-binding molecule of the present invention comprises exactly two proteinaceous components. In certain embodiments, the multivalent CD20-binding molecule of the present invention comprises two or more components, wherein at least one component is associated with the multivalent CD20-binding molecule through one or more non-covalent interactions. In certain further embodiments, at least one of the components is proteinaceous. In certain further embodiments, the multivalent CD20-binding molecule of the present invention comprises two or more proteinaceous components associated with each other, either directly or indirectly, through one or more non-covalent interactions. In certain further embodiments, each proteinaceous component comprises (1) at least one CD20 binding region capable of specifically binding an extracellular part of a CD20, and (2) a Shiga toxin effector polypeptide.

[0021] In certain embodiments, the multivalent CD20-binding molecule of the present invention comprises two or more proteinaceous components (e.g. protein subunits), wherein each proteinaceous component comprises (1) at least one CD20 binding region capable of specifically binding an extracellular part of a CD20 molecule, and, optionally, (2) one or more Shiga toxin effector regions, each comprising a polypeptide derived from the amino acid sequence of the A Subunit of at least one member of the Shiga toxin family. In certain further embodiments, each proteinaceous component comprises (1) only one CD20 binding region capable of specifically binding an extracellular part of a CD20 molecule, and (2) only one Shiga toxin effector region. In certain further embodiments, the multivalent CD20-binding molecule of the present invention comprises exactly two proteinaceous components. In certain embodiments, the multivalent CD20-binding molecule of the present invention comprises two or more components, wherein at least one component is associated with the multivalent CD20-binding molecule through one or more non-covalent interactions. In certain further embodiments, at least one of the components is proteinaceous. In certain further embodiments, the multivalent CD20-binding molecule of the present invention comprises two or more proteinaceous components associated with each other, either directly or indirectly, through one or more non-covalent interactions. In certain further embodiments, each proteinaceous component comprises (1) at least one CD20 binding region capable of specifically binding an extracellular part of a CD20, and (2) a Shiga toxin effector region.

[0022] In certain embodiments, the multivalent CD20-binding molecule of the present invention comprises at least one CD20 binding region comprising an immunoglobulin-type binding region. In certain further embodiments, the multivalent CD20-binding molecule of the present invention comprises the CD20 binding region comprising an immunoglobulin-type binding region comprising a polypeptide selected from the group consisting of: an autonomous V_{H} domain, single-domain antibody fragment (sdAb), nanobody, heavy chain-antibody domain derived from a camelid (V_{H}H or V_{H} domain fragment), heavy-chain antibody domain derived from a cartilaginous fish (V_{H}H or V_{H} domain fragment), immunoglobulin new antigen receptor (IgNAR), V_{NAR} fragment, single-chain variable fragment (scFv), antibody variable fragment (Fv), complementary determining region 3 fragment (CDR3), constrained FR3-CDR3-FR4 polypeptide (FR3-CDR3-FR4), Fd fragment, small modular immunopharmaceutical (SMIP) domain, antigen-binding fragment (Fab), Armadillo repeat polypeptide (ArmRP), fibronectin-derived 10^{th} fibronectin type III domain (10Fn3), tenascin type III domain (TNfn3), ankyrin repeat motif domain, low-density-lipoprotein-receptor-derived A-domain (LDLR-A), lipocalin (anticalin), Kunitz domain, Protein-A-derived Z domain, gamma-B crystalline-derived domain, ubiquitin-derived domain, Sac7d-derived polypeptide (affitin), Fyn-derived SH2 domain, miniprotein, C-type lectin-like domain scaffold, engineered antibody mimic, and any genetically manipulated counterparts of any of the foregoing which retain binding functionality.

[0023] In certain embodiments, the multivalent CD20-binding molecule of the present invention does not comprise an immunoglobulin Fc region or Fc region effector which retains an Fc region function, such as, e.g., involving extracellular signaling to immune system factors, cells, and/or tissues. Non-limiting examples of Fc region functions include activating T-cells, stimulating the release of inflammatory mediators such as cytokines like TNF-alpha, initiating complement dependent cytotoxicity (CDC), antibody-dependent cytotoxicity (ADCC), and phagocytosis of the cell bound extracellularly by the molecule comprising the Fc region.

[0024] In certain embodiments, the multivalent CD20-binding molecule of the present invention does not comprise any immunoglobulin heavy chain constant region, immunoglobulin light chain constant region, immunoglobulin C_{L} domain, immunoglobulin C_{H}1 domain, immunoglobulin C_{H}2 domain, and/or immunoglobulin C_{H}3 domain. In certain further embodiments, the multivalent CD20-binding molecule does not comprise any immunoglobulin domains other than the immunoglobulin domains selected from (1) CDR, (2) ABR, and/or (3) any immunoglobulin domain present in an autonomous V_{H} domain, single-domain antibody domains (sdAb), heavy-chain antibody domain fragment (V_{H}H fragments or V_{H} domain fragment), and single-chain variable fragment (scFv). In certain embodiments, the multivalent CD20-binding molecule of the present invention does not comprise any immunoglobulin domain or any polypeptide derived from an immunoglobulin.

[0025] In certain embodiments, the multivalent CD20-binding molecule of the present invention comprises at least one Shiga toxin effector polypeptide comprising or consisting essentially of the polypeptide selected from the group consisting of: (a) amino acids 75 to 251 of SEQ ID NO:1, SEQ ID NO:2, or SEQ ID NO:3; (b) amino acids 1 to 241 SEQ ID NO:1, SEQ ID NO:2, or SEQ ID NO:3; (c) amino acids 1 to 251 of SEQ ID NO:1, SEQ ID NO:2, or SEQ ID NO:3; and (d) amino acids 1 to 261 of SEQ ID NO:1, SEQ ID NO:2, or SEQ ID NO:3.

[0026] In certain embodiments, the multivalent CD20-binding molecule of the present invention comprises at least one Shiga toxin effector region comprising or consisting essentially of the polypeptide selected from the group consisting of: (a) amino acids 75 to 251 of SEQ ID NO:1, SEQ ID NO:2, or SEQ ID NO:3; (b) amino acids 1 to 241 SEQ ID NO:1, SEQ ID NO:2, or SEQ ID NO:3; (c) amino acids 1 to 251 of SEQ ID NO:1, SEQ ID NO:2, or SEQ ID NO:3; and (d) amino acids 1 to 261 of SEQ ID NO:1, SEQ ID NO:2, or SEQ ID NO:3.

[0027] In certain embodiments of the multivalent CD20-binding molecule of the present invention, the multivalent CD20-binding molecule is monomeric. In certain other embodiments, the multivalent CD20-binding molecule is multimeric, e.g. the molecule comprises at least two, independent, polypeptide chains (e.g. protein subunits) associated either directly or indirectly to form a single molecule. In certain further embodiments, the multimeric, multivalent CD20-binding molecule of the present invention comprises two or more protein components, e.g., two or more individual CD20-binding proteins. In certain embodiments, the multimeric, multivalent CD20-binding molecule of the present invention comprises two or more protein components (e.g. subunits) which are associated through one or more non-covalent interactions.

[0028] In certain embodiments, the multimeric, multivalent CD20-binding molecule of the present invention comprises two or more proteins components (e.g. subunits) which are associated through one or more covalent interactions. In certain further embodiments, the multivalent CD20-binding molecule of the present invention comprises two or more protein components, e.g., two or more individual CD20-binding proteins, which are associated through one or more covalent interactions, wherein at a least one covalent interaction is a disulfide bond between at least two of the protein components (e.g., between different protein subunits).

[0029] In certain embodiments, the multivalent CD20-binding molecule of the present invention comprises the molecule shown in any one of SEQ ID NOs: 1-304.

[0030] In certain embodiments, the multivalent CD20-binding molecule of the present invention comprises a CD20 binding region which comprises the immunoglobulin-type binding region comprising a polypeptide(s) selected from the group consisting of: (a) a heavy chain variable (V_{H}) domain comprising (i) a HCDR1 comprising or consisting essentially of the amino acid sequence as shown in SEQ ID NO:5, SEQ ID NO:11, SEQ ID NO:17, SEQ ID NO:23, SEQ ID NO:29, or SEQ ID NO:35; (ii) a HCDR2 comprising or consisting essentially of the amino acid sequence as shown in SEQ ID NO:6, SEQ ID NO:12, SEQ ID NO:18, SEQ ID NO:24, SEQ ID NO:30, or SEQ ID NO:36; and/or (iii) a HCDR3 comprising or consisting essentially of the amino acid sequence as shown in SEQ ID NO:7, SEQ ID NO:13, SEQ ID NO:19, SEQ ID NO:25, SEQ ID NO:31, or SEQ ID NO:37; and/or (b) a light chain variable (V_{L}) domain comprising (i) a LCDR1 comprising or consisting essentially of the amino acid sequence as shown in SEQ ID NO:8, SEQ ID NO:14, SEQ ID NO:20, SEQ ID NO:26, SEQ ID NO:32, or SEQ ID NO:38; (ii) a LCDR2 comprising or consisting essentially of the amino acid sequence as shown in SEQ ID NO:9, SEQ ID NO:15, SEQ ID NO:21, SEQ ID NO:27, SEQ ID NO:33, or SEQ ID NO:39; and/or (iii) a LCDR3 comprising or consisting essentially of the amino acid sequence as shown in SEQ ID NO:10, SEQ ID NO:16, SEQ ID NO:22, SEQ ID NO:28, SEQ ID NO:34, or SEQ ID NO:40.

[0031] In certain embodiments, the multivalent CD20-binding molecule of the present invention comprises the CD20 binding region comprising or consisting essentially of amino acids 1-232, 1-233, 1-234, 1-235, 1-236, 1-242, 1-243, 1-244, 1-245, 1-246, 1-252, 1-253, 1-254, 1-255, or 1-256 of any one of SEQ ID NOs: 47-119 and 176-248.

[0032] In certain embodiments, the multivalent CD20-binding molecule of the present invention comprises the protein shown in any one of SEQ ID NOs: 47-304, and optionally, the protein further comprises an amino-terminal methionine residue. In certain further embodiments, the multivalent CD20-binding molecule of the present invention comprises or consists essentially of two proteins, each protein selected from any one of the polypeptides shown in SEQ ID NOs: 47-304, and optionally, each protein further comprises an amino-terminal methionine residue. In certain further embodiments, the protein is selected from any one of the proteins shown in SEQ ID NOs: 47-175 and further comprises a disulfide bond involving a cysteine residue at the position selected from the group consisting of: 242, 482, 483, 484, 490, 491, 492, 493, 494, 495, 499, 500, 501, 502, 503, 504, 505, 510, 511, 512, 513, and 521.

[0033] In certain embodiments, the multivalent CD20-binding molecule of the present invention is multimeric and comprises or consists essentially of: (a) two polypeptides selected from the polypeptides shown in SEQ ID NOs: 47-175 and 249-304, which each optionally may further comprise an amino-terminal methionine residue, and (b) a cysteine disulfide bond linking the two polypeptides, wherein the cysteine disulfide bond involves a cysteine residue in each of the two polypeptides located at amino acid position 242, 482, 483, 484, 490, 491, 492, 493, 494, 495, 499, 500, 501, 502, 503, 504, 505, 510, 511, 512, 513, or 521. In certain further embodiments, the multivalent CD20-binding molecule of the present invention is a homodimer and consists essentially of: (a) two identical polypeptides, the polypeptides selected from one of the polypeptides shown in SEQ ID NOs: 47-175 and 249-304, and (b) a cysteine disulfide bond linking the two identical polypeptides, wherein the cysteine disulfide bond involves a cysteine residue in each of the two identical polypeptides located at amino acid position 242, 482, 483, 484, 490, 491, 492, 493, 494, 495, 499, 500, 501, 502, 503, 504, 505, 510, 511, 512, 513, or 521. In certain embodiments, the multivalent CD20-binding molecule of the present invention is a homodimer, wherein the two identical polypeptides are both the polypeptide shown in SEQ ID NO:49, and the amino acid position of the cysteine residue is 490. In certain embodiments, the multivalent CD20-binding molecule of the present invention is a homodimer, wherein the two identical polypeptides are both selected from the polypeptide shown in SEQ ID NO:50, SEQ ID NO:61, SEQ ID NO:73, SEQ ID NO:96, SEQ ID NO:101, or SEQ ID NO:102; and the amino acid position of the cysteine residue is 501. In certain embodiments, the multivalent CD20-binding molecule of the present invention is a homodimer, wherein the two identical polypeptides are both selected from the polypeptide shown in SEQ ID NO:53, SEQ ID NO:63, SEQ ID NO:66, SEQ ID NO:75, SEQ ID NO:83, SEQ ID NO:89, or SEQ ID NO:95; and the amino acid position of the cysteine residue is 512. In certain embodiments, the multivalent CD20-binding molecule of the present invention is a homodimer, wherein the two identical polypeptides are both the polypeptide shown in SEQ ID NO:54, and the amino acid position of the cysteine residue is 503. In certain embodiments, the multivalent CD20-binding molecule of the present invention is a homodimer, wherein the two identical polypeptides are both selected from the polypeptide shown in SEQ ID NO:55, SEQ ID NO:64, SEQ ID NO:67, SEQ ID NO:76, SEQ ID NO:90, SEQ ID NO:92, SEQ ID NO:93, SEQ ID NO:97, or SEQ ID NO:98; and the amino acid position of the cysteine residue is 502. In certain embodiments, the multivalent CD20-binding molecule of the present invention is a homodimer, wherein the two identical polypeptides are both selected from the polypeptide shown in SEQ ID NO:56, SEQ ID NO:68, SEQ ID NO:91, SEQ ID NO:99, SEQ ID NO:103, or SEQ ID NO:104; and the amino acid position of the cysteine residue is 492. In certain embodiments, the multivalent CD20-binding molecule of the present invention is a homodimer, wherein the two identical polypeptides are both selected from the polypeptide shown in SEQ ID NO:54, SEQ ID NO:57, SEQ ID NO:69, SEQ ID NO:78, SEQ ID NO:82, SEQ ID NO:84, SEQ ID NO:87, SEQ ID NO:88, SEQ ID NO:94, SEQ ID NO:110, SEQ ID NO:111, or SEQ ID NO:115; and the amino acid position of the cysteine residue is 503. In certain embodiments, the multivalent CD20-binding molecule of the present invention is a homodimer, wherein the two identical polypeptides are both selected from the polypeptide shown in SEQ ID NO:58, SEQ ID NO:70, or SEQ ID NO:81; and the amino acid position of the cysteine residue is 493. In certain embodiments, the multivalent CD20-binding molecule of the present invention is a homodimer, wherein the two identical polypeptides are both selected from only the polypeptides shown in SEQ ID NOs: 249-304, and the amino acid position of the cysteine residue is 242.

[0034] For certain embodiments of the multivalent CD20-binding molecule of the present invention, the multivalent CD20-binding molecule is monospecific for CD20-binding. In certain further embodiments, all the CD20 binding regions present in the multivalent CD20-binding molecule bind, on their own, the same extracellular part of the same CD20. In certain further embodiments, all the CD20 binding regions present in the multivalent CD20-binding molecule bind, on their own, the same extracellular CD20 epitope with equivalent specificities.

[0035] In certain embodiments, the multivalent CD20-binding molecule of the present invention comprises one or more monovalent CD20-binding molecule components; and whereby upon administration of the multivalent CD20-binding molecule of the present invention to a population of cells physically coupled with CD20, which have the extracellular part bound by two or more CD20 binding regions of the multivalent CD20-binding molecule, the multivalent CD20-binding molecule exhibits a cytotoxic effect to the population of cells which is greater than a cytotoxic effect resulting from administration of an equivalent amount, mass, or molarity of any one of the monovalent CD20-binding molecule components of the multivalent CD20-binding molecule to a population of the same CD20 positive cells under same conditions by a factor of 1.33, 1.5, 1.75, 2, 3, 5, 7.5, 10, 20, 100, or greater than the change in CD20-binding valence between the monovalent CD20-binding component and the multivalent CD20-binding molecule. For certain further embodiments, members of the population of cells express at a cellular surface the CD20 which (1) have the extracellular part bound by the two or more CD20 binding regions of the multivalent CD20-binding molecule, (2) have a transmembrane domain, and (3) remain physically coupled to the cell. For certain further embodiments, members of the population of cells are CD20 positive cells. For certain embodiments, the members of the population of cells are physically coupled with a significant amount of extracellular CD20 which (1) have the extracellular part bound by the two or more CD20 binding regions of the multivalent CD20-binding molecule. For certain embodiments, members of the population of cells are descendants or members of a B-cell lineage. For certain embodiments, members of the population of cells are selected from the group consisting of: malignant B-cell, B-cell leukemia cell, B-cell lymphoma cell, B-cell myeloma cell, acute myeloid leukemia cell, acute non-lymphocytic leukemia cell, B-cell chronic lymphocytic leukemia cell, B-cell lymphoma cell, B-cell non-Hodgkin's lymphoma cell, B-cell precursor acute lymphoblastic leukemia cell, B-cell prolymphocytic leukemia cell, Burkitt's lymphoma cell, chronic lymphocytic leukemia cell, chronic myeloid leukemia cell, diffuse large B-cell lymphoma cell, follicular lymphoma cell, hairy cell leukemia cell, Hodgkin's lymphoma cell, immunoblastic large cell lymphoma cell, mantle cell lymphoma cell, melanoma cell, multiple myeloma cell, neoplastic plasma cell, nodular lymphocyte predominant Hodgkin's lymphoma cell, non-Hodgkin's lymphoma cell, plasmablastic lymphoma cell, plasma cell myeloma cell, precursor B-lymphoblastic lymphoma cell, small lymphocytic lymphoma cell, malignant T-cell, T-cell leukemia cell, T-cell lymphoma cell, T-cell large granular lymphocyte leukemia cell, T-cell prolymphocytic leukemia, healthy B-cell lineage cell, and/or healthy T-cell. In certain embodiments, the multivalent CD20-binding molecule of the present invention comprises one or more monovalent CD20-binding molecule components; and whereby upon administration of the multivalent CD20-binding molecule of the present invention to a population of CD20 positive cells expressing CD20 which have the extracellular part bound by two or more CD20 binding regions of the multivalent CD20-binding molecule, the multivalent CD20-binding molecule exhibits a cytotoxic effect which is greater than a cytotoxic effect resulting from administration of an equivalent amount, mass, or molarity of any one of the monovalent CD20-binding molecule components of the multivalent CD20-binding molecule to a population of the same CD20 positive cells under same conditions by a factor of 1.33, 1.5, 1.75, 2, 3, 5, 7.5, 10, 20, 100, or greater than the change in CD20-binding valence between the monovalent CD20-binding component and the multivalent CD20-binding molecule.

[0036] In certain embodiments, the multivalent CD20-binding molecule of the present invention comprises one or more monovalent CD20-binding molecule components; and whereby upon administration of the multivalent CD20-binding molecule of the present invention to a population of cells physically coupled with CD20, which have the extracellular part bound by two or more CD20 binding regions of the multivalent CD20-binding molecule, the multivalent CD20-binding molecule exhibits a cytotoxic effect which is greater than a cytotoxic effect resulting from administration of an equivalent amount, mass, or molarity of any one of the monovalent CD20-binding molecule components of the multivalent CD20-binding molecule to a population of the same CD20 positive cells under same conditions by a factor of 1.33, 1.5, 1.75, 2, 3, 5, 7.5, 10, 20, 100, or greater than the change in equilibrium binding constants (K_{D}) between the multivalent CD20-binding molecule and the monovalent CD20-binding component for binding to CD20 or CD20-expressing cell. For certain further embodiments, members of the population of cells express at a cellular surface the CD20 which (1) have the extracellular part bound by the two or more CD20 binding regions of the multivalent CD20-binding molecule, (2) have a transmembrane domain, and (3) remain physically coupled to the cell. For certain further embodiments, members of the population of cells are CD20 positive cells. For certain embodiments, the members of the population of cells are physically coupled with a significant amount of extracellular CD20 which (1) have the extracellular part bound by the two or more CD20 binding regions of the multivalent CD20-binding molecule. For certain embodiments, members of the population of cells are descendants or members of a B-cell lineage. For certain embodiments, members of the population of cells are selected from the group consisting of: malignant B-cell, B-cell leukemia cell, B-cell lymphoma cell, B-cell myeloma cell, acute myeloid leukemia cell, acute non-lymphocytic leukemia cell, B-cell chronic lymphocytic leukemia cell, B-cell lymphoma cell, B-cell non-Hodgkin's lymphoma cell, B-cell precursor acute lymphoblastic leukemia cell, B-cell prolymphocytic leukemia cell, Burkitt's lymphoma cell, chronic lymphocytic leukemia cell, chronic myeloid leukemia cell, diffuse large B-cell lymphoma cell, follicular lymphoma cell, hairy cell leukemia cell, Hodgkin's lymphoma cell, immunoblastic large cell lymphoma cell, mantle cell lymphoma cell, melanoma cell, multiple myeloma cell, neoplastic plasma cell, nodular lymphocyte predominant Hodgkin's lymphoma cell, non-Hodgkin's lymphoma cell, plasmablastic lymphoma cell, plasma cell myeloma cell, precursor B-lymphoblastic lymphoma cell, small lymphocytic lymphoma cell, malignant T-cell, T-cell leukemia cell, T-cell lymphoma cell, T-cell large granular lymphocyte leukemia cell, T-cell prolymphocytic leukemia, healthy B-cell lineage cell, and/or healthy T-cell. In certain embodiments, the multivalent CD20-binding molecule of the present invention comprises one or more monovalent CD20-binding molecule components; and whereby upon administration of the multivalent CD20-binding molecule of the present invention to a population of CD20 positive cells expressing CD20 which have the extracellular part bound by two or more CD20 binding regions of the multivalent CD20-binding molecule, the multivalent CD20-binding molecule exhibits a cytotoxic effect which is greater than a cytotoxic effect resulting from administration of an equivalent amount, mass, or molarity of any one of the monovalent CD20-binding molecule components of the multivalent CD20-binding molecule to a population of the same CD20 positive cells under same conditions by a factor of 1.33, 1.5, 1.75, 2, 3, 5, 7.5, 10, 20, 100, or greater than the change in equilibrium binding constants (K_{D}) between the multivalent CD20-binding molecule and the monovalent CD20-binding component for binding to CD20 or CD20-expressing cell.

[0037] In certain embodiments, the multivalent CD20-binding molecule of the present invention comprises one or more monovalent CD20-binding molecule components; and whereby upon administration of the multivalent CD20-binding molecule of the present invention to a population of cells physically coupled with CD20, which have the extracellular part bound by two or more CD20 binding regions of the multivalent CD20-binding molecule, the multivalent CD20-binding molecule exhibits a cytotoxic effect which is greater than a cytotoxic effect resulting from administration of an equivalent amount, mass, or molarity of any one of the monovalent CD20-binding molecule components of the multivalent CD20-binding molecule to a population of the same CD20 positive cells under same conditions by a factor of 1.33, 1.5, 1.75, 2, 3, 5, 7.5, 10, 20, 100, or greater than the change in affinity constant (1/K_{D}) between the multivalent CD20-binding molecule and the monovalent CD20-binding component for binding to CD20 or CD20-expressing cell. For certain further embodiments, members of the population of cells express at a cellular surface the CD20 which (1) have the extracellular part bound by the two or more CD20 binding regions of the multivalent CD20-binding molecule, (2) have a transmembrane domain, and (3) remain physically coupled to the cell. For certain further embodiments, members of the population of cells are CD20 positive cells. For certain embodiments, the members of the population of cells are physically coupled with a significant amount of extracellular CD20 which (1) have the extracellular part bound by the two or more CD20 binding regions of the multivalent CD20-binding molecule. For certain embodiments, members of the population of cells are descendants or members of a B-cell lineage. For certain embodiments, members of the population of cells are selected from the group consisting of: malignant B-cell, B-cell leukemia cell, B-cell lymphoma cell, B-cell myeloma cell, acute myeloid leukemia cell, acute non-lymphocytic leukemia cell, B-cell chronic lymphocytic leukemia cell, B-cell lymphoma cell, B-cell non-Hodgkin's lymphoma cell, B-cell precursor acute lymphoblastic leukemia cell, B-cell prolymphocytic leukemia cell, Burkitt's lymphoma cell, chronic lymphocytic leukemia cell, chronic myeloid leukemia cell, diffuse large B-cell lymphoma cell, follicular lymphoma cell, hairy cell leukemia cell, Hodgkin's lymphoma cell, immunoblastic large cell lymphoma cell, mantle cell lymphoma cell, melanoma cell, multiple myeloma cell, neoplastic plasma cell, nodular lymphocyte predominant Hodgkin's lymphoma cell, non-Hodgkin's lymphoma cell, plasmablastic lymphoma cell, plasma cell myeloma cell, precursor B-lymphoblastic lymphoma cell, small lymphocytic lymphoma cell, malignant T-cell, T-cell leukemia cell, T-cell lymphoma cell, T-cell large granular lymphocyte leukemia cell, T-cell prolymphocytic leukemia, healthy B-cell lineage cell, and/or healthy T-cell. In certain embodiments, the multivalent CD20-binding molecule of the present invention comprises one or more monovalent CD20-binding molecule components; and whereby upon administration of the multivalent CD20-binding molecule of the present invention to a population of CD20 positive cells expressing CD20 which have the extracellular part bound by two or more CD20 binding regions of the multivalent CD20-binding molecule, the multivalent CD20-binding molecule exhibits a cytotoxic effect which is greater than a cytotoxic effect resulting from administration of an equivalent amount, mass, or molarity of any one of the monovalent CD20-binding molecule components of the multivalent CD20-binding molecule to a population of the same CD20 positive cells under same conditions by a factor of 1.33, 1.5, 1.75, 2, 3, 5, 7.5, 10, 20, 100, or greater than the change in affinity constant (1/K_{D}) between the multivalent CD20-binding molecule and the monovalent CD20-binding component for binding to CD20 or CD20-expressing cell.

[0038] In certain embodiments of the multivalent CD20-binding molecule of the present invention, one or more polypeptide components of the CD20-binding molecule comprises a carboxy-terminal endoplasmic reticulum retention/retrieval signal motif of a member of the KDEL family. In certain further embodiments, the carboxy-terminal endoplasmic reticulum retention/retrieval signal motif is selected from the group consisting of: KDEL (SEQ ID NO:305), HDEF (SEQ ID NO:306), HDEL (SEQ ID NO:307), RDEF (SEQ ID NO:308), RDEL (SEQ ID NO:309), WDEL (SEQ ID NO:310), YDEL (SEQ ID NO:311), HEEF (SEQ ID NO:312), HEEL (SEQ ID NO:313), KEEL (SEQ ID NO:314), REEL (SEQ ID NO:315), KAEL (SEQ ID NO:316), KCEL (SEQ ID NO:317), KFEL (SEQ ID NO:318), KGEL (SEQ ID NO:319), KHEL (SEQ ID NO:320), KLEL (SEQ ID NO:321), KNEL (SEQ ID NO:322), KQEL (SEQ ID NO:323), KREL (SEQ ID NO:324), KSEL (SEQ ID NO:325), KVEL (SEQ ID NO:326), KWEL (SEQ ID NO:327), KYEL (SEQ ID NO:328), KEDL (SEQ ID NO:329), KIEL (SEQ ID NO:330), DKEL (SEQ ID NO:331), FDEL (SEQ ID NO:332), KDEF (SEQ ID NO:333), KKEL (SEQ ID NO:334), HADL (SEQ ID NO:335), HAEL (SEQ ID NO:336), HIEL (SEQ ID NO:337), HNEL (SEQ ID NO:338), HTEL (SEQ ID NO:339), KTEL (SEQ ID NO:340), HVEL (SEQ ID NO:341), NDEL (SEQ ID NO:342), QDEL (SEQ ID NO:343), REDL (SEQ ID NO:344), RNEL (SEQ ID NO:345), RTDL (SEQ ID NO:346), RTEL (SEQ ID NO:347), SDEL (SEQ ID NO:348), TDEL (SEQ ID NO:349), SKEL (SEQ ID NO:350), STEL (SEQ ID NO:351), and EDEL (SEQ ID NO:352).

[0039] In certain embodiments of the multivalent CD20-binding molecule of the present invention, one or more Shiga toxin effector polypeptides comprises a mutation relative to a naturally occurring A Subunit of a member of the Shiga toxin family that changes the enzymatic activity of the Shiga toxin effector polypeptide, the mutation selected from at least one amino acid residue deletion, insertion, or substitution, such as, e.g., A231E, R75A, Y77S, Y114S, E167D, R170A, R176K and/or W203A in SEQ ID NO:1, SEQ ID NO:2, SEQ ID NO:3, or SEQ ID NO:4. In certain further embodiments, the mutation is selected from at least one amino acid residue deletion, insertion, or substitution that reduces or eliminates catalytic activity but retains at least one other Shiga toxin effector function, such as, e.g., inducing cellular internalization and/or directing subcellular routing. In certain further embodiments, the mutation reduces or eliminates cytotoxicity of the Shiga toxin effecter polypeptide.

[0040] In certain embodiments of the multivalent CD20-binding molecule of the present invention, one or more Shiga toxin effector regions comprises a mutation relative to a naturally occurring A Subunit of a member of the Shiga toxin family that changes the enzymatic activity of the Shiga toxin effector region, the mutation selected from at least one amino acid residue deletion, insertion, or substitution, such as, e.g., A231E, R75A, Y77S, Y114S, E167D, R170A, R176K and/or W203A in SEQ ID NO:1, SEQ ID NO:2, SEQ ID NO:3, or SEQ ID NO:4. In certain further embodiments, the mutation is selected from at least one amino acid residue deletion, insertion, or substitution that reduces or eliminates catalytic activity but retains at least one other Shiga toxin effector function, such as, e.g., inducing cellular internalization and/or directing subcellular routing. In certain further embodiments, the mutation reduces or eliminates cytotoxicity of the Shiga toxin effecter region.

[0041] For certain embodiments of the multivalent CD20-binding molecule, the multivalent CD20-binding molecule may be utilized for the delivery of additional exogenous material into a cell. In certain embodiments, the multivalent CD20-binding molecule of the present invention comprises an additional exogenous material. For certain embodiments of the multivalent CD20-binding molecule of the present invention, which comprises an additional exogenous material; whereby upon administration of the multivalent CD20-binding molecule to one or more cells physically coupled with CD20, which have the extracellular part bound by the two or more CD20 binding regions of the multivalent CD20-binding molecule, the multivalent CD20-binding molecule internalizes into the one or more cells in about five hours, four hours, three hours, two hours, one hour, thirty minutes, or less at a physiological temperature appropriate for the cell and/or at about 37 degrees Celsius. For certain further embodiments, the one or more cell(s) expresses at a cellular surface the CD20 which (1) have the extracellular part bound by the two or more CD20 binding regions of the multivalent CD20-binding molecule, (2) have a transmembrane domain, and (3) remain physically coupled to the cell. For certain further embodiments, one or more cell(s) is a CD20 positive cell. For certain embodiments, one or more cell(s) is physically coupled with a significant amount of extracellular CD20 which (1) have the extracellular part bound by the two or more CD20 binding regions of the multivalent CD20-binding molecule. For certain embodiments, one or more cell(s) is a descendant or member of a B-cell lineage. For certain embodiments, one or more cell(s) is selected from the group consisting of: malignant B-cell, B-cell leukemia cell, B-cell lymphoma cell, B-cell myeloma cell, acute myeloid leukemia cell, acute non-lymphocytic leukemia cell, B-cell chronic lymphocytic leukemia cell, B-cell lymphoma cell, B-cell non-Hodgkin's lymphoma cell, B-cell precursor acute lymphoblastic leukemia cell, B-cell prolymphocytic leukemia cell, Burkitt's lymphoma cell, chronic lymphocytic leukemia cell, chronic myeloid leukemia cell, diffuse large B-cell lymphoma cell, follicular lymphoma cell, hairy cell leukemia cell, Hodgkin's lymphoma cell, immunoblastic large cell lymphoma cell, mantle cell lymphoma cell, melanoma cell, multiple myeloma cell, neoplastic plasma cell, nodular lymphocyte predominant Hodgkin's lymphoma cell, non-Hodgkin's lymphoma cell, plasmablastic lymphoma cell, plasma cell myeloma cell, precursor B-lymphoblastic lymphoma cell, small lymphocytic lymphoma cell, malignant T-cell, T-cell leukemia cell, T-cell lymphoma cell, T-cell large granular lymphocyte leukemia cell, T-cell prolymphocytic leukemia, healthy B-cell lineage cell, and/or healthy T-cell.

[0042] For certain embodiments of the multivalent CD20-binding molecule of the present invention, which comprises an additional exogenous material; whereby upon administration of the multivalent CD20-binding molecule to one or more cells physically coupled with CD20, which have the extracellular part bound by the two or more CD20 binding regions of the multivalent CD20-binding molecule, the multivalent CD20-binding molecule internalizes into the one or more cells and delivers the additional exogenous material into the interior of the cell in about five hours, four hours, three hours, two hours, one hour, thirty minutes, or less at a physiological temperature appropriate for the cell and/or at about 37 degrees Celsius. For certain further embodiments, the one or more cell(s) expresses at a cellular surface the CD20 which (1) have the extracellular part bound by the two or more CD20 binding regions of the multivalent CD20-binding molecule, (2) have a transmembrane domain, and (3) remain physically coupled to the cell. For certain further embodiments, one or more cell(s) is a CD20 positive cell. For certain embodiments, one or more cell(s) is physically coupled with a significant amount of extracellular CD20 which (1) have the extracellular part bound by the two or more CD20 binding regions of the multivalent CD20-binding molecule. For certain embodiments, one or more cell(s) is a descendant or member of a B-cell lineage. For certain embodiments, one or more cell(s) is selected from the group consisting of: malignant B-cell, B-cell leukemia cell, B-cell lymphoma cell, B-cell myeloma cell, acute myeloid leukemia cell, acute non-lymphocytic leukemia cell, B-cell chronic lymphocytic leukemia cell, B-cell lymphoma cell, B-cell non-Hodgkin's lymphoma cell, B-cell precursor acute lymphoblastic leukemia cell, B-cell prolymphocytic leukemia cell, Burkitt's lymphoma cell, chronic lymphocytic leukemia cell, chronic myeloid leukemia cell, diffuse large B-cell lymphoma cell, follicular lymphoma cell, hairy cell leukemia cell, Hodgkin's lymphoma cell, immunoblastic large cell lymphoma cell, mantle cell lymphoma cell, melanoma cell, multiple myeloma cell, neoplastic plasma cell, nodular lymphocyte predominant Hodgkin's lymphoma cell, non-Hodgkin's lymphoma cell, plasmablastic lymphoma cell, plasma cell myeloma cell, precursor B-lymphoblastic lymphoma cell, small lymphocytic lymphoma cell, malignant T-cell, T-cell leukemia cell, T-cell lymphoma cell, T-cell large granular lymphocyte leukemia cell, T-cell prolymphocytic leukemia, healthy B-cell lineage cell, and/or healthy T-cell.

[0043] For certain embodiments of the multivalent CD20-binding molecule of the present invention, which comprises an additional exogenous material; whereby upon administration of the multivalent CD20-binding molecule to a plurality of cells physically coupled with CD20, which have the extracellular part bound by the two or more CD20 binding regions of the multivalent CD20-binding molecule, at a concentration of multivalent CD20-binding molecule equivalent to five or thirty-eight percent to fifty percent cell-surface occupancy, the majority of the multivalent CD20-binding molecule internalizes into the plurality of cells in about five hours, four hours, three hours, two hours, one hour, thirty minutes, or less at a physiological temperature appropriate for the cell and/or at about 37 degrees Celsius. For certain further embodiments, members of the plurality of cells express at a cellular surface the CD20 which (1) have the extracellular part bound by the two or more CD20 binding regions of the multivalent CD20-binding molecule, (2) have a transmembrane domain, and (3) remain physically coupled to the cell. For certain further embodiments, members of the plurality of cells are CD20 positive cells. For certain embodiments, the members of the plurality of cells are physically coupled with a significant amount of extracellular CD20 which (1) have the extracellular part bound by the two or more CD20 binding regions of the multivalent CD20-binding molecule. For certain embodiments, members of the plurality of cells are descendants or members of a B-cell lineage. For certain embodiments, members of the plurality of cells are selected from the group consisting of: malignant B-cell, B-cell leukemia cell, B-cell lymphoma cell, B-cell myeloma cell, acute myeloid leukemia cell, acute non-lymphocytic leukemia cell, B-cell chronic lymphocytic leukemia cell, B-cell lymphoma cell, B-cell non-Hodgkin's lymphoma cell, B-cell precursor acute lymphoblastic leukemia cell, B-cell prolymphocytic leukemia cell, Burkitt's lymphoma cell, chronic lymphocytic leukemia cell, chronic myeloid leukemia cell, diffuse large B-cell lymphoma cell, follicular lymphoma cell, hairy cell leukemia cell, Hodgkin's lymphoma cell, immunoblastic large cell lymphoma cell, mantle cell lymphoma cell, melanoma cell, multiple myeloma cell, neoplastic plasma cell, nodular lymphocyte predominant Hodgkin's lymphoma cell, non-Hodgkin's lymphoma cell, plasmablastic lymphoma cell, plasma cell myeloma cell, precursor B-lymphoblastic lymphoma cell, small lymphocytic lymphoma cell, malignant T-cell, T-cell leukemia cell, T-cell lymphoma cell, T-cell large granular lymphocyte leukemia cell, T-cell prolymphocytic leukemia, healthy B-cell lineage cell, and/or healthy T-cell.

[0044] For certain embodiments of the multivalent CD20-binding molecule of the present invention, which comprises an additional exogenous material; whereby upon administration of the multivalent CD20-binding molecule to one or more cells physically coupled with CD20, which have the extracellular part bound by the two or more CD20 binding regions of the multivalent CD20-binding molecule, the multivalent CD20-binding molecule internalizes into the one or more cells and delivers the additional exogenous material into the interior of the cell in about five hours, four hours, three hours, two hours, one hour, thirty minutes, or less at a physiological temperature appropriate for the cell and/or at about 37 degrees Celsius. For certain further embodiments, the one or more cell(s) expresses at a cellular surface the CD20 which (1) have the extracellular part bound by the two or more CD20 binding regions of the multivalent CD20-binding molecule, (2) have a transmembrane domain, and (3) remain physically coupled to the cell. For certain further embodiments, one or more cell(s) is a CD20 positive cell. For certain embodiments, one or more cell(s) is physically coupled with a significant amount of extracellular CD20 which (1) have the extracellular part bound by the two or more CD20 binding regions of the multivalent CD20-binding molecule. For certain embodiments, one or more cell(s) is a descendant or member of a B-cell lineage. For certain embodiments, one or more cell(s) is selected from the group consisting of: malignant B-cell, B-cell leukemia cell, B-cell lymphoma cell, B-cell myeloma cell, acute myeloid leukemia cell, acute non-lymphocytic leukemia cell, B-cell chronic lymphocytic leukemia cell, B-cell lymphoma cell, B-cell non-Hodgkin's lymphoma cell, B-cell precursor acute lymphoblastic leukemia cell, B-cell prolymphocytic leukemia cell, Burkitt's lymphoma cell, chronic lymphocytic leukemia cell, chronic myeloid leukemia cell, diffuse large B-cell lymphoma cell, follicular lymphoma cell, hairy cell leukemia cell, Hodgkin's lymphoma cell, immunoblastic large cell lymphoma cell, mantle cell lymphoma cell, melanoma cell, multiple myeloma cell, neoplastic plasma cell, nodular lymphocyte predominant Hodgkin's lymphoma cell, non-Hodgkin's lymphoma cell, plasmablastic lymphoma cell, plasma cell myeloma cell, precursor B-lymphoblastic lymphoma cell, small lymphocytic lymphoma cell, malignant T-cell, T-cell leukemia cell, T-cell lymphoma cell, T-cell large granular lymphocyte leukemia cell, T-cell prolymphocytic leukemia, healthy B-cell lineage cell, and/or healthy T-cell.

[0045] For certain embodiments of the multivalent CD20-binding molecule of the present invention, which comprises an additional exogenous material; whereby upon administration of the multivalent CD20-binding molecule to a plurality of cells physically coupled with CD20, which have the extracellular part bound by the two or more CD20 binding regions of the multivalent CD20-binding molecule, at a concentration of multivalent CD20-binding molecule equivalent to five or thirty-eight percent to fifty percent cell-surface occupancy, the majority of the multivalent CD20-binding molecule internalizes into the plurality of cells and delivers the additional exogenous material into the interiors of the cells in about five hours, four hours, three hours, two hours, one hour, thirty minutes, or less at a physiological temperature appropriate for the cell and/or at about 37 degrees Celsius. For certain further embodiments, members of the plurality of cells express at a cellular surface the CD20 which (1) have the extracellular part bound by the two or more CD20 binding regions of the multivalent CD20-binding molecule, (2) have a transmembrane domain, and (3) remain physically coupled to the cell. For certain further embodiments, members of the plurality of cells are CD20 positive cells. For certain embodiments, the members of the plurality of cells are physically coupled with a significant amount of extracellular CD20 which (1) have the extracellular part bound by the two or more CD20 binding regions of the multivalent CD20-binding molecule. For certain embodiments, members of the plurality of cells are descendants or members of a B-cell lineage. For certain embodiments, members of the plurality of cells are selected from the group consisting of: malignant B-cell, B-cell leukemia cell, B-cell lymphoma cell, B-cell myeloma cell, acute myeloid leukemia cell, acute non-lymphocytic leukemia cell, B-cell chronic lymphocytic leukemia cell, B-cell lymphoma cell, B-cell non-Hodgkin's lymphoma cell, B-cell precursor acute lymphoblastic leukemia cell, B-cell prolymphocytic leukemia cell, Burkitt's lymphoma cell, chronic lymphocytic leukemia cell, chronic myeloid leukemia cell, diffuse large B-cell lymphoma cell, follicular lymphoma cell, hairy cell leukemia cell, Hodgkin's lymphoma cell, immunoblastic large cell lymphoma cell, mantle cell lymphoma cell, melanoma cell, multiple myeloma cell, neoplastic plasma cell, nodular lymphocyte predominant Hodgkin's lymphoma cell, non-Hodgkin's lymphoma cell, plasmablastic lymphoma cell, plasma cell myeloma cell, precursor B-lymphoblastic lymphoma cell, small lymphocytic lymphoma cell, malignant T-cell, T-cell leukemia cell, T-cell lymphoma cell, T-cell large granular lymphocyte leukemia cell, T-cell prolymphocytic leukemia, healthy B-cell lineage cell, and/or healthy T-cell.

[0046] The embodiments of the multivalent CD20-binding molecules of the present invention for the delivery of additional exogenous material into a cell each comprise (1) two or more CD20 binding regions, each capable of specifically binding an extracellular part of a CD20 and (2) an additional exogenous material. In certain embodiments, the multivalent CD20-binding molecule of the present invention comprises an additional exogenous material selected from the group consisting of: cytotoxic agent, detection promoting agent, peptide, polypeptide, protein, and polynucleotide. In certain further embodiments, the additional exogenous material is the protein comprising an enzyme. In certain other embodiments, the additional exogenous material is the polynucleotide which functions as a small inhibiting RNA (siRNA) or microRNA (miRNA). In certain embodiments, the additional exogenous material is the peptide which is an antigen, such as, e.g., from a pathogen. In certain embodiments, the antigen comprises or consists essentially of SEQ ID NO:46. In certain embodiments, the antigen is derived from a molecule selected from the group consisting of: bacterial protein, protein mutated in cancer, protein aberrantly expressed in cancer, T-cell complementary determining region polypeptide, and/or viral protein. In certain embodiments, the cytotoxic agent is a chemotherapeutic agent, cytotoxic antibiotic, alkylating agent, antimetabolite, topoisomerase inhibitor, and/or tubulin inhibitor.

[0047] The present invention also provides compositions comprising a multivalent CD20-binding molecule (multivalent CD20-binding molecule compositions) of the present invention, such as, e.g., compositions enriched for a multivalent CD20-binding molecule of the present invention and/or compositions with relatively large proportions of multivalent CD20-binding molecule relative to monovalent CD20-binding molecules. In certain embodiments, the multivalent CD20-binding molecule composition of the present invention comprises a multivalent CD20-binding molecule of the present invention, wherein the composition comprises a ratio of monovalent CD20-binding molecule concentration to total CD20-binding molecule concentration of less than one to three; and wherein each monovalent CD20-binding molecule comprises only one CD20 binding region capable of specifically binding an extracellular part of a CD20 and comprises at least one Shiga toxin effector polypeptide. In certain further embodiments, the multivalent CD20-binding molecule composition comprises the ratio of monovalent CD20-binding molecule concentration to total CD20-binding protein concentration of less than the ratio selected from the following: 1:5, 1:6, 1:7, 1:8, 1:9, 1:10, and 1:11. In certain embodiments, the multivalent CD20-binding molecule composition of the present invention comprises a ratio of multivalent CD20-binding molecule concentration to total CD20-binding molecule concentration of more than two to three.

[0048] In certain embodiments, the multivalent CD20-binding molecule composition of the present invention comprises a ratio of relatively large valence, CD20-binding molecule concentration to total CD20-binding molecule concentration of less than the ratio selected from the following: 1:4, 1:7, 1:11, 1:21, 1:41, 1:71, 1:111, and 1:161; wherein each relatively large valence, CD20-binding molecule comprises three or more CD20 binding regions capable of specifically binding an extracellular part of a CD20 and comprises at least one Shiga toxin effector polypeptide.

[0049] In certain embodiments, the multivalent CD20-binding molecule composition of the present invention comprises a ratio of bivalent CD20-binding molecule concentration to total CD20-binding molecule concentration of more than a ratio selected from the following: 1:2, 2:3, 3:4, 4:5, 5:6, 7:8, 8:9, 9:10, 10:11, 11:12, 12:13, 13:14, and 14:15; wherein each bivalent CD20-binding molecule comprises (1) only two CD20 binding regions capable of specifically binding an extracellular part of a CD20 and (2) one or more Shiga toxin effector polypeptides.

[0050] For certain embodiments of the multivalent CD20-binding molecule composition of the present invention, upon administration of the multivalent CD20-binding molecule composition to a first population of cells physically coupled to CD20, and a second population of cells, a cytotoxic effect of the multivalent CD20-binding molecule composition to members of said first population of cells relative to members of said second population of cells is at least 3-fold greater. For certain further embodiments, members of the first population of cells express at a cellular surface the CD20 which (1) have the extracellular part bound by the two or more CD20 binding regions of a multivalent CD20-binding molecule of the multivalent CD20-binding molecule composition, (2) have a transmembrane domain, and (3) remain physically coupled to the cell. For certain further embodiments, members of the first population of cells are CD20 positive cells. For certain embodiments, the members of the first population of cells are physically coupled with a significant amount of extracellular CD20 which (1) have the extracellular part bound by the two or more CD20 binding regions of a multivalent CD20-binding molecule of the multivalent CD20-binding molecule composition. For certain embodiments, members of the first population of cells over-express, at a cellular surface, CD20 which have the extracellular part bound by the two or more CD20 binding regions of a multivalent CD20-binding molecule of the multivalent CD20-binding molecule composition. For certain embodiments, members of the first population of cells over-express CD20 which (1) have the extracellular part bound by the two or more CD20 binding regions of a multivalent CD20-binding molecule of the multivalent CD20-binding molecule composition, (2) have a transmembrane domain, and (3) remain physically coupled to the cell. For certain embodiments, members of the first population of cells are descendants or members of a B-cell lineage. For certain embodiments, members of the first population of cells are selected from the group consisting of: malignant B-cell, B-cell leukemia cell, B-cell lymphoma cell, B-cell myeloma cell, acute myeloid leukemia cell, acute non-lymphocytic leukemia cell, B-cell chronic lymphocytic leukemia cell, B-cell lymphoma cell, B-cell non-Hodgkin's lymphoma cell, B-cell precursor acute lymphoblastic leukemia cell, B-cell prolymphocytic leukemia cell, Burkitt's lymphoma cell, chronic lymphocytic leukemia cell, chronic myeloid leukemia cell, diffuse large B-cell lymphoma cell, follicular lymphoma cell, hairy cell leukemia cell, Hodgkin's lymphoma cell, immunoblastic large cell lymphoma cell, mantle cell lymphoma cell, melanoma cell, multiple myeloma cell, neoplastic plasma cell, nodular lymphocyte predominant Hodgkin's lymphoma cell, non-Hodgkin's lymphoma cell, plasmablastic lymphoma cell, plasma cell myeloma cell, precursor B-lymphoblastic lymphoma cell, small lymphocytic lymphoma cell, malignant T-cell, T-cell leukemia cell, T-cell lymphoma cell, T-cell large granular lymphocyte leukemia cell, T-cell prolymphocytic leukemia, healthy B-cell lineage cell, and/or healthy T-cell. For certain embodiments, the members of the second population of cells are not physically coupled with extracellular CD20 and/or are CD20 negative. For certain embodiments, the members of the second population of cells are not physically coupled with extracellular CD20 which (1) have the extracellular part bound by the two or more CD20 binding regions of the multivalent CD20-binding molecule. For certain further embodiments, members of the second population of cells express at a cellular surface the CD20 which (1) have the extracellular part bound by the two or more CD20 binding regions of a multivalent CD20-binding molecule of the multivalent CD20-binding molecule composition, (2) have a transmembrane domain, and (3) remain physically coupled to the cell. For certain embodiments, the members of the second population of cells are not physically coupled with a significant amount of extracellular CD20 which (1) have the extracellular part bound by the two or more CD20 binding regions of any multivalent CD20-binding molecule of the multivalent CD20-binding molecule composition. For certain embodiments of the multivalent CD20-binding molecule composition of the present invention, upon administration of the multivalent CD20-binding molecule composition to a first population of cells whose members are CD20 positive, and a second population of cells whose members are not CD20 positive, a cytotoxic effect of the multivalent CD20-binding molecule composition to members of said first population of cells relative to members of said second population of cells is at least 3-fold greater.

[0051] In certain embodiments, the multivalent CD20-binding molecule composition of the present invention comprises a multivalent CD20-binding molecule having one or more monovalent CD20-binding molecule components; and whereby upon administration of the multivalent CD20-binding molecule composition of the present invention to a population of cells physically coupled with CD20, which have the extracellular part bound by two or more CD20 binding regions of the multivalent CD20-binding molecule, the multivalent CD20-binding molecule composition exhibits a cytotoxic effect which is greater than a cytotoxic effect resulting from administration of an equivalent amount, mass, or molarity of any one of the monovalent CD20-binding molecule components to a population of the same CD20 positive cells under same conditions by a factor of 1.33, 1.5, 1.75, 2, 3, 5, 7.5, 10, 20, 100, or greater than the change in CD20-binding valence between the monovalent CD20-binding component and the multivalent CD20-binding molecule. For certain further embodiments, members of the population of cells express at a cellular surface the CD20 which (1) have the extracellular part bound by the two or more CD20 binding regions of the multivalent CD20-binding molecule, (2) have a transmembrane domain, and (3) remain physically coupled to the cell. For certain further embodiments, members of the population of cells are CD20 positive cells. For certain embodiments, the members of the population of cells are physically coupled with a significant amount of extracellular CD20 which (1) have the extracellular part bound by the two or more CD20 binding regions of the multivalent CD20-binding molecule. For certain embodiments, members of the population of cells are descendants or members of a B-cell lineage. For certain embodiments, members of the population of cells are selected from the group consisting of: malignant B-cell, B-cell leukemia cell, B-cell lymphoma cell, B-cell myeloma cell, acute myeloid leukemia cell, acute non-lymphocytic leukemia cell, B-cell chronic lymphocytic leukemia cell, B-cell lymphoma cell, B-cell non-Hodgkin's lymphoma cell, B-cell precursor acute lymphoblastic leukemia cell, B-cell prolymphocytic leukemia cell, Burkitt's lymphoma cell, chronic lymphocytic leukemia cell, chronic myeloid leukemia cell, diffuse large B-cell lymphoma cell, follicular lymphoma cell, hairy cell leukemia cell, Hodgkin's lymphoma cell, immunoblastic large cell lymphoma cell, mantle cell lymphoma cell, melanoma cell, multiple myeloma cell, neoplastic plasma cell, nodular lymphocyte predominant Hodgkin's lymphoma cell, non-Hodgkin's lymphoma cell, plasmablastic lymphoma cell, plasma cell myeloma cell, precursor B-lymphoblastic lymphoma cell, small lymphocytic lymphoma cell, malignant T-cell, T-cell leukemia cell, T-cell lymphoma cell, T-cell large granular lymphocyte leukemia cell, T-cell prolymphocytic leukemia, healthy B-cell lineage cell, and/or healthy T-cell. In certain embodiments, the multivalent CD20-binding molecule composition of the present invention comprises a multivalent CD20-binding molecule having one or more monovalent CD20-binding molecule components; and whereby upon administration of the multivalent CD20-binding molecule composition of the present invention to a population of CD20 positive cells expressing CD20 which have the extracellular part bound by two or more CD20 binding regions of the multivalent CD20-binding molecule, the multivalent CD20-binding molecule composition exhibits a cytotoxic effect which is greater than a cytotoxic effect resulting from administration of an equivalent amount, mass, or molarity of any one of the monovalent CD20-binding molecule components to a population of the same CD20 positive cells under same conditions by a factor of 1.33, 1.5, 1.75, 2, 3, 5, 7.5, 10, 20, 100, or greater than the change in CD20-binding valence between the monovalent CD20-binding component and the multivalent CD20-binding molecule.

[0052] For certain embodiments of the multivalent CD20-binding molecule composition of the present invention, which comprises a multivalent CD20-binding molecule having an additional exogenous material; whereby upon administration of the multivalent CD20-binding molecule composition to a plurality of cells physically coupled with CD20, which have the extracellular part bound by the two or more CD20 binding regions of the multivalent CD20-binding molecule, at a concentration of multivalent CD20-binding molecule equivalent to five or thirty-eight percent to fifty percent cell-surface occupancy, the majority of the multivalent CD20-binding molecule internalizes into the plurality of cells in about five hours, four hours, three hours, two hours, one hour, thirty minutes, or less at a physiological temperature appropriate for the cell and/or at about 37 degrees Celsius. For certain further embodiments, members of the plurality of cells express at a cellular surface the CD20 which (1) have the extracellular part bound by the two or more CD20 binding regions of the multivalent CD20-binding molecule, (2) have a transmembrane domain, and (3) remain physically coupled to the cell. For certain further embodiments, members of the plurality of cells are CD20 positive cells. For certain embodiments, the members of the plurality of cells are physically coupled with a significant amount of extracellular CD20 which (1) have the extracellular part bound by the two or more CD20 binding regions of the multivalent CD20-binding molecule. For certain embodiments, members of the plurality of cells are descendants or members of a B-cell lineage. For certain embodiments, members of the plurality of cells are selected from the group consisting of: malignant B-cell, B-cell leukemia cell, B-cell lymphoma cell, B-cell myeloma cell, acute myeloid leukemia cell, acute non-lymphocytic leukemia cell, B-cell chronic lymphocytic leukemia cell, B-cell lymphoma cell, B-cell non-Hodgkin's lymphoma cell, B-cell precursor acute lymphoblastic leukemia cell, B-cell prolymphocytic leukemia cell, Burkitt's lymphoma cell, chronic lymphocytic leukemia cell, chronic myeloid leukemia cell, diffuse large B-cell lymphoma cell, follicular lymphoma cell, hairy cell leukemia cell, Hodgkin's lymphoma cell, immunoblastic large cell lymphoma cell, mantle cell lymphoma cell, melanoma cell, multiple myeloma cell, neoplastic plasma cell, nodular lymphocyte predominant Hodgkin's lymphoma cell, non-Hodgkin's lymphoma cell, plasmablastic lymphoma cell, plasma cell myeloma cell, precursor B-lymphoblastic lymphoma cell, small lymphocytic lymphoma cell, malignant T-cell, T-cell leukemia cell, T-cell lymphoma cell, T-cell large granular lymphocyte leukemia cell, T-cell prolymphocytic leukemia, healthy B-cell lineage cell, and/or healthy T-cell.

[0053] For certain embodiments of the multivalent CD20-binding molecule composition of the present invention, which comprises a multivalent CD20-binding molecule having an additional exogenous material; whereby upon administration of the multivalent CD20-binding molecule composition to one or more cells physically coupled with CD20, which have the extracellular part bound by the two or more CD20 binding regions of the multivalent CD20-binding molecule, the multivalent CD20-binding molecule internalizes into the one or more cells and delivers the additional exogenous material into the interior of the cell in about five hours, four hours, three hours, two hours, one hour, thirty minutes, or less at a physiological temperature appropriate for the cell and/or at about 37 degrees Celsius. For certain further embodiments, the one or more cell(s) expresses at a cellular surface the CD20 which (1) have the extracellular part bound by the two or more CD20 binding regions of the multivalent CD20-binding molecule, (2) have a transmembrane domain, and (3) remain physically coupled to the cell. For certain further embodiments, one or more cell(s) is a CD20 positive cell. For certain embodiments, one or more cell(s) is physically coupled with a significant amount of extracellular CD20 which (1) have the extracellular part bound by the two or more CD20 binding regions of the multivalent CD20-binding molecule. For certain embodiments, one or more cell(s) is a descendant or member of a B-cell lineage. For certain embodiments, one or more cell(s) is selected from the group consisting of: malignant B-cell, B-cell leukemia cell, B-cell lymphoma cell, B-cell myeloma cell, acute myeloid leukemia cell, acute non-lymphocytic leukemia cell, B-cell chronic lymphocytic leukemia cell, B-cell lymphoma cell, B-cell non-Hodgkin's lymphoma cell, B-cell precursor acute lymphoblastic leukemia cell, B-cell prolymphocytic leukemia cell, Burkitt's lymphoma cell, chronic lymphocytic leukemia cell, chronic myeloid leukemia cell, diffuse large B-cell lymphoma cell, follicular lymphoma cell, hairy cell leukemia cell, Hodgkin's lymphoma cell, immunoblastic large cell lymphoma cell, mantle cell lymphoma cell, melanoma cell, multiple myeloma cell, neoplastic plasma cell, nodular lymphocyte predominant Hodgkin's lymphoma cell, non-Hodgkin's lymphoma cell, plasmablastic lymphoma cell, plasma cell myeloma cell, precursor B-lymphoblastic lymphoma cell, small lymphocytic lymphoma cell, malignant T-cell, T-cell leukemia cell, T-cell lymphoma cell, T-cell large granular lymphocyte leukemia cell, T-cell prolymphocytic leukemia, healthy B-cell lineage cell, and/or healthy T-cell.

[0054] For certain embodiments of the multivalent CD20-binding molecule composition of the present invention, which comprises a multivalent CD20-binding molecule having an additional exogenous material; whereby upon administration of the multivalent CD20-binding molecule composition to a plurality of cells physically coupled with CD20, which have the extracellular part bound by the two or more CD20 binding regions of the multivalent CD20-binding molecule, at a concentration of multivalent CD20-binding molecule equivalent to five or thirty-eight percent to fifty percent cell-surface occupancy, the majority of the multivalent CD20-binding molecule internalizes into the plurality of cells and delivers the additional exogenous material into the interiors of the cells in about five hours, four hours, three hours, two hours, one hour, thirty minutes, or less at a physiological temperature appropriate for the cell and/or at about 37 degrees Celsius. For certain further embodiments, members of the plurality of cells express at a cellular surface the CD20 which (1) have the extracellular part bound by the two or more CD20 binding regions of the multivalent CD20-binding molecule, (2) have a transmembrane domain, and (3) remain physically coupled to the cell. For certain further embodiments, members of the plurality of cells are CD20 positive cells. For certain embodiments, the members of the plurality of cells are physically coupled with a significant amount of extracellular CD20 which (1) have the extracellular part bound by the two or more CD20 binding regions of the multivalent CD20-binding molecule. For certain embodiments, members of the plurality of cells are descendants or members of a B-cell lineage. For certain embodiments, members of the plurality of cells are selected from the group consisting of: malignant B-cell, B-cell leukemia cell, B-cell lymphoma cell, B-cell myeloma cell, acute myeloid leukemia cell, acute non-lymphocytic leukemia cell, B-cell chronic lymphocytic leukemia cell, B-cell lymphoma cell, B-cell non-Hodgkin's lymphoma cell, B-cell precursor acute lymphoblastic leukemia cell, B-cell prolymphocytic leukemia cell, Burkitt's lymphoma cell, chronic lymphocytic leukemia cell, chronic myeloid leukemia cell, diffuse large B-cell lymphoma cell, follicular lymphoma cell, hairy cell leukemia cell, Hodgkin's lymphoma cell, immunoblastic large cell lymphoma cell, mantle cell lymphoma cell, melanoma cell, multiple myeloma cell, neoplastic plasma cell, nodular lymphocyte predominant Hodgkin's lymphoma cell, non-Hodgkin's lymphoma cell, plasmablastic lymphoma cell, plasma cell myeloma cell, precursor B-lymphoblastic lymphoma cell, small lymphocytic lymphoma cell, malignant T-cell, T-cell leukemia cell, T-cell lymphoma cell, T-cell large granular lymphocyte leukemia cell, T-cell prolymphocytic leukemia, healthy B-cell lineage cell, and/or healthy T-cell.

[0055] The present invention also provides solvates, hydrates, salts, and/or powders comprising a multivalent CD20-binding molecule and/or multivalent CD20-binding molecule composition of the present invention. For certain embodiments, the solvate of the present invention comprises one or more multivalent CD20-binding molecules of the present invention and/or a multivalent CD20-binding molecule composition of the present invention. For certain embodiments, the salt of the present invention comprises one or more multivalent CD20-binding molecules of the present invention and/or a multivalent CD20-binding molecule composition of the present invention.

[0056] The present invention also provides pharmaceutical compositions comprising a multivalent CD20-binding molecule of the present invention and/or a multivalent CD20-binding molecule composition of the present invention, and comprising at least one pharmaceutically acceptable excipient or carrier; and the use of such a multivalent CD20-binding molecule or a composition comprising it in making such pharmaceutical compositions and in methods of the present invention as further described herein. Certain embodiments of the present invention are pharmaceutical compositions comprising any multivalent CD20 binding molecule of the present invention (e.g. a multivalent CD20-binding protein of the present invention) and at least one pharmaceutically acceptable excipient or carrier.

[0057] The present invention also provides pharmaceutical compositions comprising a multivalent CD20-binding molecule of the present invention, a multivalent CD20-binding molecule composition of the present invention, a solvate of the present invention, and/or a salt of the present invention; and comprising at least one pharmaceutically acceptable excipient, carrier, buffer, isotonic agent, surfactant, antioxidant, and/or metal-chelating agent.

[0058] Certain embodiments of the present invention are pharmaceutical compositions comprising any multivalent CD20 binding molecule of the present invention (e.g. a multivalent CD20-binding protein of the present invention) and at least one pharmaceutically acceptable carrier, solvent, vehicle, sterile aqueous solution, buffer, powder, sterile powder, surfactant, antioxidant, chelating agent, antimicrobial agent, preservative, isotonic agent, dispersion medium, coating, adjuvant, wetting agent, emulsifying agent, dispersing agent, adsorption delaying agent, stabilizer, and/or additive.

[0059] In certain embodiments, multivalent CD20-binding molecule composition, the solvate, the salt, or the pharmaceutical composition of the present invention comprises: acetate, alcohol, alpha-tocopherol, aluminum monostearate, ascorbic acid, ascorbyl palmitate, benzyl alcohol, butylated hydroxyanisole, butylated hydroxytoluene, chlorobutanol, citrate, cysteine hydrochloride, dextrose, ethanol, ethylenediaminetetraacetic acid, ethyloleate, gelatin, glycerine, glycerol, lactic acid, lecithin, mannitol, methyl parabens, monostearate salt, organic ester, paraben, phenol phosphate, phosphoric acid, polyalcohol, polyethylene glycol, polyol, propylene glycol, propylgallate, Ringer's solution, saline, sodium bisulfate, sodium bisulfite, sodium chloride, sodium metabisulfite, sodium sulfite, sorbic acid, sorbitol, sugar, tartaric acid, vegetable oil, and/or water.

[0060] Certain embodiments of the present invention are pharmaceutical compositions comprising any multivalent CD20 binding molecule of the present invention (e.g. a multivalent CD20-binding protein of the present invention) and at least one pharmaceutically acceptable excipient or carrier. In certain further embodiments, the excipient is selected from the group consisting of: acetate, alcohol, alpha-tocopherol, aluminum monostearate, ascorbic acid, ascorbyl palmitate, benzyl alcohol, butylated hydroxyanisole, butylated hydroxytoluene, chlorobutanol, citrate, cysteine hydrochloride, dextrose, ethanol, ethylenediaminetetraacetic acid, ethyloleate, gelatin, glycerine, glycerol, lactic acid, lecithin, mannitol, methyl parabens, monostearate salt, organic ester, paraben, phenol phosphate, phosphoric acid, polyalcohol, polyethylene glycol, polyol, propylene glycol, propylgallate, sodium bisulfate, sodium bisulfite, sodium chloride, sodium metabisulfite, sodium sulfite, sorbic acid, sorbitol, sugar, tartaric acid, and/or vegetable oil.

[0061] Among certain embodiments of the present invention is a diagnostic composition comprising a multivalent CD20-binding molecule of the present invention that further comprises a detection promoting agent for the collection of information about a cell, cell type, tissue, organ, disease, disorder, condition, subject, and/or patient.

[0062] In certain embodiments, the solvate, salt, pharmaceutical composition, and/or diagnostic composition of the present invention comprises a ratio of monovalent CD20-binding molecule concentration to total CD20-binding molecule concentration of less than one to three; and wherein each monovalent CD20-binding molecule comprises only one CD20 binding region capable of specifically binding an extracellular part of a CD20 and comprises at least one Shiga toxin effector polypeptide. In certain further embodiments, the solvate, salt, pharmaceutical composition, and/or diagnostic composition comprises the ratio of monovalent CD20-binding molecule concentration to total CD20-binding protein concentration of less than the ratio selected from the following: 1:5, 1:6, 1:7, 1:8, 1:9, 1:10, and 1:11. In certain embodiments, the solvate, salt, pharmaceutical composition, and/or diagnostic composition of the present invention comprises a ratio of multivalent CD20-binding molecule concentration to total CD20-binding molecule concentration of more than two to three.

[0063] In certain embodiments, the solvate, salt, pharmaceutical composition, and/or diagnostic composition of the present invention comprises a ratio of relatively large valence, CD20-binding molecule concentration to total CD20-binding molecule concentration of less than the ratio selected from the following: 1:4, 1:7, 1:11, 1:21, 1:41, 1:71, 1:111, and 1:161; wherein each relatively large valence, CD20-binding molecule comprises three or more CD20 binding regions capable of specifically binding an extracellular part of a CD20 and comprises at least one Shiga toxin effector polypeptide.

[0064] In certain embodiments, the solvate, salt, pharmaceutical composition, and/or diagnostic composition the present invention comprises a ratio of bivalent CD20-binding molecule concentration to total CD20-binding molecule concentration of more than a ratio selected from the following: 1:2, 2:3, 3:4, 4:5, 5:6, 7:8, 8:9, 9:10, 10:11, 11:12, 12:13, 13:14, and 14:15; wherein each bivalent CD20-binding molecule comprises (1) only two CD20 binding regions capable of specifically binding an extracellular part of a CD20 and (2) one or more Shiga toxin effector polypeptides.

[0065] Beyond the multivalent CD20-binding molecules of the present invention, and compositions thereof, polynucleotides capable of encoding a multivalent CD20-binding molecule of the present invention (e.g. a multivalent CD20-binding protein), or polypeptide component thereof, are within the scope of the present invention, as well as expression vectors which comprise a polynucleotide of the invention and host cells comprising an expression vector of the present invention. Host cells comprising an expression vector of the present invention may be used, e.g., in methods for producing a multivalent CD20-binding molecule of the present invention or a polypeptide component or fragment thereof by recombinant expression. Similarly, host cells comprising an expression vector of the present invention may be used, e.g., in methods for producing a multivalent CD20-binding molecule composition of the present invention, or a polypeptide component thereof.

[0066] The present invention also encompasses any composition of matter of the present invention which is immobilized on a solid substrate. Such arrangements of the compositions of matter of the present invention may be utilized, e.g., in methods of screening molecules as described herein.

[0067] Additionally, the present invention provides methods of killing cell(s) comprising the step of contacting a cell(s) with a multivalent CD20-binding molecule of the present invention, a multivalent CD20-binding molecule composition of the present invention, a solvate of the present invention, a salt of the present invention, and/or a pharmaceutical composition of the present invention. For certain embodiments, the step of contacting the cell(s) occurs in vitro. For certain other embodiments, the step of contacting the cell(s) occurs in vivo. For certain embodiments of the cell-killing methods of the present invention, the method is capable of selectively killing cell(s) and/or cell types preferentially over other cell(s) and/or cell types when contacting a mixture of cells comprising different cells which differ with respect to the cell-surface presence and/or expression level of a CD20 bound by the two or more CD20 binding regions of the multivalent CD20-binding molecule and/or the multivalent CD20-binding molecule of the composition of the present invention (e.g., a multivalent CD20-binding molecule composition and/or a pharmaceutical composition of the present invention).

[0068] In addition, the present invention provides a method of inducing cellular internalization of a multivalent CD20-binding molecule into a cell(s) physically coupled with CD20, which have the extracellular part bound by two or more CD20 binding regions of the multivalent CD20-binding molecule, the method comprising the step of contacting the cell(s) with a multivalent CD20-binding molecule of the present invention, a multivalent CD20-binding molecule composition of the present invention, a solvate of the present invention, a salt of the present invention, a pharmaceutical composition of the present invention, and/or a diagnostic composition of the present invention. For certain further embodiments of the inducing cellular internalization method, the step of contacting the cell(s) occurs in vitro. For certain other embodiments, the step of contacting the cell(s) occurs in vivo, such as, e.g., within a patient. For certain further embodiments of the inducing cellular internalization method, the cellular internalization of the multivalent CD20-binding molecule occurs in about five hours, four hours, three hours, two hours, one hour, thirty minutes, or less at a physiological temperature appropriate for the cell and/or at about 37 degrees Celsius. For certain further embodiments, the cell expresses at a cellular surface the CD20 which (1) have the extracellular part bound by the two or more CD20 binding regions of the multivalent CD20-binding molecule, (2) have a transmembrane domain, and (3) remain physically coupled to the cell. For certain further embodiments, the cell is a CD20 positive cell. For certain embodiments, the cell is physically coupled with a significant amount of extracellular CD20 which (1) have the extracellular part bound by the two or more CD20 binding regions of the multivalent CD20-binding molecule. For certain embodiments, the cell is a descendant or member of a B-cell lineage. For certain embodiments, the cell is selected from the group consisting of: malignant B-cell, B-cell leukemia cell, B-cell lymphoma cell, B-cell myeloma cell, acute myeloid leukemia cell, acute non-lymphocytic leukemia cell, B-cell chronic lymphocytic leukemia cell, B-cell lymphoma cell, B-cell non-Hodgkin's lymphoma cell, B-cell precursor acute lymphoblastic leukemia cell, B-cell prolymphocytic leukemia cell, Burkitt's lymphoma cell, chronic lymphocytic leukemia cell, chronic myeloid leukemia cell, diffuse large B-cell lymphoma cell, follicular lymphoma cell, hairy cell leukemia cell, Hodgkin's lymphoma cell, immunoblastic large cell lymphoma cell, mantle cell lymphoma cell, melanoma cell, multiple myeloma cell, neoplastic plasma cell, nodular lymphocyte predominant Hodgkin's lymphoma cell, non-Hodgkin's lymphoma cell, plasmablastic lymphoma cell, plasma cell myeloma cell, precursor B-lymphoblastic lymphoma cell, small lymphocytic lymphoma cell, malignant T-cell, T-cell leukemia cell, T-cell lymphoma cell, T-cell large granular lymphocyte leukemia cell, T-cell prolymphocytic leukemia, healthy B-cell lineage cell, and/or healthy T-cell.

[0069] For certain embodiments, the present invention provides a method of inducing cellular internalization of a multivalent CD20-binding molecule into a plurality of cells physically coupled with CD20, which have the extracellular part bound by two or more CD20 binding regions of the multivalent CD20-binding molecule, the method comprising the step of contacting the plurality of cells with a multivalent CD20-binding molecule of the present invention, a multivalent CD20-binding molecule composition of the present invention, a solvate of the present invention, a salt of the present invention, a pharmaceutical composition of the present invention, and/or a diagnostic composition of the present invention. For certain further embodiments of the inducing cellular internalization method, the step of contacting the cell(s) occurs in vitro. For certain other embodiments, the step of contacting the cell(s) occurs in vivo, such as, e.g., within a patient. For certain further embodiments of the inducing cellular internalization method, the cellular internalization of the multivalent CD20-binding molecule occurs in about five hours, four hours, three hours, two hours, one hour, thirty minutes, or less at a physiological temperature appropriate for the cell and/or at about 37 degrees Celsius. For certain further embodiments, members of the plurality of cells express at a cellular surface the CD20 which (1) have the extracellular part bound by the two or more CD20 binding regions of the multivalent CD20-binding molecule, (2) have a transmembrane domain, and (3) remain physically coupled to the cell. For certain further embodiments, members of the plurality of cells are CD20 positive cells. For certain embodiments, the members of the plurality of cells are physically coupled with a significant amount of extracellular CD20 which (1) have the extracellular part bound by the two or more CD20 binding regions of the multivalent CD20-binding molecule. For certain embodiments, members of the plurality of cells are descendants or members of a B-cell lineage. For certain embodiments, members of the plurality of cells are selected from the group consisting of: malignant B-cell, B-cell leukemia cell, B-cell lymphoma cell, B-cell myeloma cell, acute myeloid leukemia cell, acute non-lymphocytic leukemia cell, B-cell chronic lymphocytic leukemia cell, B-cell lymphoma cell, B-cell non-Hodgkin's lymphoma cell, B-cell precursor acute lymphoblastic leukemia cell, B-cell prolymphocytic leukemia cell, Burkitt's lymphoma cell, chronic lymphocytic leukemia cell, chronic myeloid leukemia cell, diffuse large B-cell lymphoma cell, follicular lymphoma cell, hairy cell leukemia cell, Hodgkin's lymphoma cell, immunoblastic large cell lymphoma cell, mantle cell lymphoma cell, melanoma cell, multiple myeloma cell, neoplastic plasma cell, nodular lymphocyte predominant Hodgkin's lymphoma cell, non-Hodgkin's lymphoma cell, plasmablastic lymphoma cell, plasma cell myeloma cell, precursor B-lymphoblastic lymphoma cell, small lymphocytic lymphoma cell, malignant T-cell, T-cell leukemia cell, T-cell lymphoma cell, T-cell large granular lymphocyte leukemia cell, T-cell prolymphocytic leukemia, healthy B-cell lineage cell, and/or healthy T-cell.

[0070] Similarly, the present invention provides a method of internalizing a cell surface localized CD20 bound by a multivalent CD20-binding molecule of the present invention, the method comprising the step of contacting a cell(s) having cell surface localized CD20, which have the extracellular part bound by two or more CD20 binding regions of the multivalent CD20-binding molecule, with a multivalent CD20-binding molecule of the present invention, a multivalent CD20-binding molecule composition of the present invention, pharmaceutical composition of the present invention, and/or a diagnostic composition of the present invention. For certain further embodiments of the method of internalizing cell surface localized CD20, the step of contacting the cell(s) occurs in vitro. For certain other embodiments, the step of contacting the cell(s) occurs in vivo, such as, e.g., within a patient. For certain further embodiments of the of the method of internalizing cell surface localized CD20, the internalization of cell surface localized CD20 occurs in about five hours, four hours, three hours, two hours, one hour, thirty minutes, or less at a physiological temperature appropriate for the cell and/or at about 37 degrees Celsius. For certain further embodiments, the cell expresses at a cellular surface the CD20 which (1) have the extracellular part bound by the two or more CD20 binding regions of the multivalent CD20-binding molecule, (2) have a transmembrane domain, and (3) remain physically coupled to the cell. For certain further embodiments, the cell is a CD20 positive cell. For certain embodiments, the cell is physically coupled with a significant amount of extracellular CD20 which (1) have the extracellular part bound by the two or more CD20 binding regions of the multivalent CD20-binding molecule. For certain embodiments, the cell is a descendant or member of a B-cell lineage. For certain embodiments, the cell is selected from the group consisting of: malignant B-cell, B-cell leukemia cell, B-cell lymphoma cell, B-cell myeloma cell, acute myeloid leukemia cell, acute non-lymphocytic leukemia cell, B-cell chronic lymphocytic leukemia cell, B-cell lymphoma cell, B-cell non-Hodgkin's lymphoma cell, B-cell precursor acute lymphoblastic leukemia cell, B-cell prolymphocytic leukemia cell, Burkitt's lymphoma cell, chronic lymphocytic leukemia cell, chronic myeloid leukemia cell, diffuse large B-cell lymphoma cell, follicular lymphoma cell, hairy cell leukemia cell, Hodgkin's lymphoma cell, immunoblastic large cell lymphoma cell, mantle cell lymphoma cell, melanoma cell, multiple myeloma cell, neoplastic plasma cell, nodular lymphocyte predominant Hodgkin's lymphoma cell, non-Hodgkin's lymphoma cell, plasmablastic lymphoma cell, plasma cell myeloma cell, precursor B-lymphoblastic lymphoma cell, small lymphocytic lymphoma cell, malignant T-cell, T-cell leukemia cell, T-cell lymphoma cell, T-cell large granular lymphocyte leukemia cell, T-cell prolymphocytic leukemia, healthy B-cell lineage cell, and/or healthy T-cell.

[0071] For certain embodiments, the present invention provides a method of internalizing a cell surface localized CD20 bound by a multivalent CD20-binding molecule of the present invention, the method comprising the step of contacting a plurality of cells having cell surface localized CD20, which have the extracellular part bound by two or more CD20 binding regions of the multivalent CD20-binding molecule, with a multivalent CD20-binding molecule of the present invention, a multivalent CD20-binding molecule composition of the present invention, pharmaceutical composition of the present invention, and/or a diagnostic composition of the present invention. For certain further embodiments of the method of internalizing cell surface localized CD20, the step of contacting the plurality of cells occurs in vitro. For certain other embodiments, the step of contacting the plurality of cells occurs in vivo, such as, e.g., within a patient. For certain further embodiments of the of the method of internalizing cell surface localized CD20, the internalization of cell surface localized CD20 occurs in a majority of the cells of the plurality of cells in about five hours, four hours, three hours, two hours, one hour, thirty minutes, or less at a physiological temperature appropriate for the cell and/or at about 37 degrees Celsius. For certain further embodiments, members of the plurality of cells express at a cellular surface the CD20 which (1) have the extracellular part bound by the two or more CD20 binding regions of the multivalent CD20-binding molecule, (2) have a transmembrane domain, and (3) remain physically coupled to the cell. For certain further embodiments, members of the plurality of cells are CD20 positive cells. For certain embodiments, the members of the plurality of cells are physically coupled with a significant amount of extracellular CD20 which (1) have the extracellular part bound by the two or more CD20 binding regions of the multivalent CD20-binding molecule. For certain embodiments, members of the plurality of cells are descendants or members of a B-cell lineage. For certain embodiments, members of the plurality of cells are selected from the group consisting of: malignant B-cell, B-cell leukemia cell, B-cell lymphoma cell, B-cell myeloma cell, acute myeloid leukemia cell, acute non-lymphocytic leukemia cell, B-cell chronic lymphocytic leukemia cell, B-cell lymphoma cell, B-cell non-Hodgkin's lymphoma cell, B-cell precursor acute lymphoblastic leukemia cell, B-cell prolymphocytic leukemia cell, Burkitt's lymphoma cell, chronic lymphocytic leukemia cell, chronic myeloid leukemia cell, diffuse large B-cell lymphoma cell, follicular lymphoma cell, hairy cell leukemia cell, Hodgkin's lymphoma cell, immunoblastic large cell lymphoma cell, mantle cell lymphoma cell, melanoma cell, multiple myeloma cell, neoplastic plasma cell, nodular lymphocyte predominant Hodgkin's lymphoma cell, non-Hodgkin's lymphoma cell, plasmablastic lymphoma cell, plasma cell myeloma cell, precursor B-lymphoblastic lymphoma cell, small lymphocytic lymphoma cell, malignant T-cell, T-cell leukemia cell, T-cell lymphoma cell, T-cell large granular lymphocyte leukemia cell, T-cell prolymphocytic leukemia, healthy B-cell lineage cell, and/or healthy T-cell.

[0072] For certain embodiments, the present invention provides a method of inducing cellular internalization of a cell surface localized CD20 bound by a multivalent CD20-binding molecule in a subject, the method comprising the step of administering to the subject a multivalent CD20-binding molecule of the present invention, a multivalent CD20-binding molecule composition of the present invention, pharmaceutical composition of the present invention, and/or a diagnostic composition of the present invention.

[0073] Additionally, the present invention provides a method for delivering an exogenous material to the inside of a cell, the method comprising the step of contacting the cell(s), either in vitro or in vivo, with a multivalent CD20-binding molecule of the present invention which comprises an additional exogenous material, a multivalent CD20-binding molecule composition of the present invention comprising a multivalent CD20-binding molecule of the present invention which comprises an additional exogenous material, a pharmaceutical composition of the present invention comprising a multivalent CD20-binding molecule of the present invention which comprises an additional exogenous material, and/or a diagnostic composition of the present invention comprising a multivalent CD20-binding molecule of the present invention which comprises an additional exogenous material. For certain further embodiments, the cell is physically coupled with CD20 which have the extracellular part bound by two or more CD20 binding regions of the multivalent CD20-binding molecule. For certain further embodiments, the cell expresses at a cellular surface the CD20 which (1) have the extracellular part bound by the two or more CD20 binding regions of the multivalent CD20-binding molecule, (2) have a transmembrane domain, and (3) remain physically coupled to the cell. For certain further embodiments, the cell is a CD20 positive cell. For certain embodiments, the cell is physically coupled with a significant amount of extracellular CD20 which (1) have the extracellular part bound by the two or more CD20 binding regions of the multivalent CD20-binding molecule. For certain embodiments, the cell is a descendant or member of a B-cell lineage. For certain embodiments, the cell is selected from the group consisting of: malignant B-cell, B-cell leukemia cell, B-cell lymphoma cell, B-cell myeloma cell, acute myeloid leukemia cell, acute non-lymphocytic leukemia cell, B-cell chronic lymphocytic leukemia cell, B-cell lymphoma cell, B-cell non-Hodgkin's lymphoma cell, B-cell precursor acute lymphoblastic leukemia cell, B-cell prolymphocytic leukemia cell, Burkitt's lymphoma cell, chronic lymphocytic leukemia cell, chronic myeloid leukemia cell, diffuse large B-cell lymphoma cell, follicular lymphoma cell, hairy cell leukemia cell, Hodgkin's lymphoma cell, immunoblastic large cell lymphoma cell, mantle cell lymphoma cell, melanoma cell, multiple myeloma cell, neoplastic plasma cell, nodular lymphocyte predominant Hodgkin's lymphoma cell, non-Hodgkin's lymphoma cell, plasmablastic lymphoma cell, plasma cell myeloma cell, precursor B-lymphoblastic lymphoma cell, small lymphocytic lymphoma cell, malignant T-cell, T-cell leukemia cell, T-cell lymphoma cell, T-cell large granular lymphocyte leukemia cell, T-cell prolymphocytic leukemia, healthy B-cell lineage cell, and/or healthy T-cell.

[0074] For certain embodiments, the present invention provides a method of delivering an exogenous material to the inside of a cell, the method comprising the step of administering to a subject a multivalent CD20-binding molecule of the present invention which comprises an additional exogenous material, a multivalent CD20-binding molecule composition of the present invention comprising a multivalent CD20-binding molecule of the present invention which comprises an additional exogenous material, a pharmaceutical composition of the present invention comprising a multivalent CD20-binding molecule of the present invention which comprises an additional exogenous material, and/or a diagnostic composition of the present invention comprising a multivalent CD20-binding molecule of the present invention which comprises an additional exogenous material. For certain further embodiments, the cell is physically coupled with CD20 which have the extracellular part bound by two or more CD20 binding regions of the multivalent CD20-binding molecule. For certain further embodiments, the cell expresses at a cellular surface the CD20 which (1) have the extracellular part bound by the two or more CD20 binding regions of the multivalent CD20-binding molecule, (2) have a transmembrane domain, and (3) remain physically coupled to the cell. For certain further embodiments, the cell is a CD20 positive cell. For certain embodiments, the cell is physically coupled with a significant amount of extracellular CD20 which (1) have the extracellular part bound by the two or more CD20 binding regions of the multivalent CD20-binding molecule. For certain embodiments, the cell is a descendant or member of a B-cell lineage. For certain embodiments, the cell is selected from the group consisting of: malignant B-cell, B-cell leukemia cell, B-cell lymphoma cell, B-cell myeloma cell, acute myeloid leukemia cell, acute non-lymphocytic leukemia cell, B-cell chronic lymphocytic leukemia cell, B-cell lymphoma cell, B-cell non-Hodgkin's lymphoma cell, B-cell precursor acute lymphoblastic leukemia cell, B-cell prolymphocytic leukemia cell, Burkitt's lymphoma cell, chronic lymphocytic leukemia cell, chronic myeloid leukemia cell, diffuse large B-cell lymphoma cell, follicular lymphoma cell, hairy cell leukemia cell, Hodgkin's lymphoma cell, immunoblastic large cell lymphoma cell, mantle cell lymphoma cell, melanoma cell, multiple myeloma cell, neoplastic plasma cell, nodular lymphocyte predominant Hodgkin's lymphoma cell, non-Hodgkin's lymphoma cell, plasmablastic lymphoma cell, plasma cell myeloma cell, precursor B-lymphoblastic lymphoma cell, small lymphocytic lymphoma cell, malignant T-cell, T-cell leukemia cell, T-cell lymphoma cell, T-cell large granular lymphocyte leukemia cell, T-cell prolymphocytic leukemia, healthy B-cell lineage cell, and/or healthy T-cell.

[0075] For certain further embodiments, the cell, cells, and population of cells referred to as (1) “cell”; (2) “cell physically coupled with CD20”; (3) “cell expressing, at a cellular surface, CD20”; (4) “CD20 positive cell”; (5) “plurality of cells”; (6) “plurality of cells physically coupled with CD20”; (7) “population of cells”; (8) “population of CD20 positive cells”; or (9) “one or more cells” are a cell, cells, or population of cells that (a) is physically coupled with extracellular CD20; (b) expresses at a cellular surface the CD20 which (i) have the extracellular part bound by the two or more CD20 binding regions of the multivalent CD20-binding molecule, (ii) have a transmembrane domain, and (iii) remain physically coupled to the cell(s); (c) is a CD20 positive; (d) is physically coupled with a significant amount of extracellular CD20 which have the extracellular part bound by the two or more CD20 binding regions of the multivalent CD20-binding molecule; (e) is a descendant or member of a B-cell lineage; (f) is cultured in a laboratory setting, is a member of an immortalized cell line, is a member of a laboratory cell strain, and/or is a member of an established human cell line; and/or (g) is one or more of the following: malignant B-cell, B-cell leukemia cell, B-cell lymphoma cell, B-cell myeloma cell, acute myeloid leukemia cell, acute non-lymphocytic leukemia cell, B-cell chronic lymphocytic leukemia cell, B-cell lymphoma cell, B-cell non-Hodgkin's lymphoma cell, B-cell precursor acute lymphoblastic leukemia cell, B-cell prolymphocytic leukemia cell, Burkitt's lymphoma cell, chronic lymphocytic leukemia cell, chronic myeloid leukemia cell, diffuse large B-cell lymphoma cell, follicular lymphoma cell, hairy cell leukemia cell, Hodgkin's lymphoma cell, immunoblastic large cell lymphoma cell, mantle cell lymphoma cell, melanoma cell, multiple myeloma cell, neoplastic plasma cell, nodular lymphocyte predominant Hodgkin's lymphoma cell, non-Hodgkin's lymphoma cell, plasmablastic lymphoma cell, plasma cell myeloma cell, precursor B-lymphoblastic lymphoma cell, small lymphocytic lymphoma cell, malignant T-cell, T-cell leukemia cell, T-cell lymphoma cell, T-cell large granular lymphocyte leukemia cell, T-cell prolymphocytic leukemia, healthy B-cell lineage cell, and/or healthy T-cell, including a laboratory culture of any of the aforementioned.

[0076] The use of any composition of the present invention for the diagnosis, prognosis, and/or characterization of a disease, disorder, and/or condition is within the scope of the present invention. Among certain embodiments of the present invention is the use of one or more compositions of matter of the present invention (e.g. a pharmaceutical composition of the present invention) in the treatment or prevention of a cancer, tumor, abnormal growth condition, and/or immune disorder. Among certain embodiments of the present invention is the use of one or more compositions of matter of the invention (e.g. a solvate, salt, or pharmaceutical composition of the present invention) in the manufacture of a medicament for the treatment or prevention of a cancer, tumor, abnormal growth condition, and/or immune disorder.

[0077] The present invention further provides methods of treating diseases, disorders, and/or conditions in subjects, the method comprising the step of administering to a subject in need thereof a therapeutically effective amount of a multivalent CD20-binding molecule of the present invention, a multivalent CD20-binding molecule composition of the present invention, a solvate of the present invention, a salt of the present invention, and/or a pharmaceutical composition of the present invention. For certain embodiments of these treatment methods of the invention, the disease, disorder, or condition to be treated using a method of the invention involves a cell, cancer cell, tumor cell, and/or immune cell which express CD20 at a cellular surface. For certain embodiments of these treatment methods of the invention, the disease, disorder, or condition to be treated using a method of the invention is a cancer, tumor, abnormal growth condition, and/or immune disorder. For certain embodiments of these treatment methods of the invention, the disease to be treated is selected from the group consisting of: hematologic cancer, leukemia, lymphoma, melanoma, and myeloma. For certain embodiments of these treatment methods of the invention, the immune disorder to be treated is selected from the group consisting of: amyloidosis, ankylosing spondylitis, asthma, Crohn's disease, diabetes, graft rejection, graft-versus-host disease, Graves' disease, Graves' ophthalmopathy, Hashimoto's thyroiditis, hemolytic uremic syndrome, HIV-related diseases, lupus erythematosus, multiple sclerosis, neuromyelitis optica spectrum disorders, N-methyl D-aspartate (NMDA) receptor encephalitis, opsoclonus myoclonus syndrome (OMS), paroxysmal nocturnal hemoglobinuria, polyarteritis nodosa, polyarthritis, psoriasis, psoriatic arthritis, rheumatoid arthritis, scleritis, scleroderma, septic shock, Sjörgren's syndrome, ulcerative colitis, and vasculitis. For certain embodiments of these treatment methods of the present invention, the cancer to be treated is selected from the group consisting of: acute myeloid leukemia (acute myelogenous leukemia or AML), acute non-lymphocytic leukemia, B-cell chronic lymphocytic leukemia (B-cell CLL), B-cell lymphoma, B-cell non-Hodgkin's lymphoma (B-cell NHL), B-cell precursor acute lymphoblastic leukemia (BCP-ALL or B-ALL), B-cell prolymphocytic leukemia (B-PLL), Burkitt's lymphoma (BL), chronic lymphocytic leukemia (CLL), chronic myeloid leukemia (CML), diffuse large B-cell lymphoma (DLBCL or DLBL), follicular lymphoma (FL), hairy cell leukemia (HCL), Hodgkin's lymphoma (HL or HD), immunoblastic large cell lymphoma, mantle cell lymphoma (MCL), multiple myeloma (MM), nodular lymphocyte predominant Hodgkin's lymphoma (NLPHL), non-Hodgkin's lymphoma (NHL), plasmablastic lymphoma, plasma cell neoplasma, plasma cell myeloma, precursor B-lymphoblastic lymphoma (B-LBL), small lymphocytic lymphoma (SLL), T-cell large granular lymphocyte leukemia (T-LGLL), T-cell lymphoma (TCL), T-cell prolymphocytic leukemia (T-PLL), and Waldenstrom's macroglobulinemia (WM).

[0078] Among certain embodiments of the present invention is a method of producing a multivalent CD20-binding molecule of the present invention and/or multivalent CD20-binding molecule composition, the method comprising the step of purifying a multivalent CD20-binding molecule or protein component thereof using an affinity purification step, such as, e.g., based on a chitin binding interaction. For certain further embodiments, the affinity purification step uses a chitin binding interaction. For certain further embodiments, the purifying step of the method involves the molecule comprising or consisting essentially of any one of the molecules shown in SEQ ID NOs: 4-304.

[0079] Among certain embodiments of the present invention is a method of producing a multivalent CD20-binding molecule of the present invention and/or multivalent CD20-binding molecule composition, the method comprising the step of oxidizing a CD20-binding molecule and/or a composition comprising a CD20-binding molecule. For certain further embodiments, the oxidizing step of the method uses a metal oxide or metal carboxylate as a catalyst. For certain further embodiments, the oxidizing step of the method uses copper sulfate as a catalyst. For certain embodiments, the oxidizing step of the method involves the CD20-binding molecule comprising or consisting essentially of any one of the molecules shown in SEQ ID NOs: 47-175 and 249-304.

[0080] Among certain embodiments of the present invention is a method of using a multivalent CD20-binding protein of the invention comprising a detection promoting agent for the collection of information useful in the diagnosis, prognosis, or characterization of a disease, disorder, or condition. Among certain embodiments of the present invention is a method of detecting a cell using a multivalent CD20-binding protein and/or diagnostic composition of the invention, the method comprising the steps of contacting a cell with the multivalent CD20-binding protein and/or diagnostic composition of the invention and detecting the presence of the multivalent CD20-binding molecule and/or diagnostic composition. For certain embodiments, the step of contacting the cell(s) occurs in vitro and/or ex vivo. For certain embodiments, the step of contacting the cell(s) occurs in vivo. For certain embodiments, the step of detecting the cell(s) occurs in vitro and/or ex vivo. For certain embodiments, the step of detecting the cell(s) occurs in vivo.

[0081] Among certain embodiments of the present invention are kits comprising a composition of matter of the present invention, and optionally, instructions for use, additional reagent(s), and/or pharmaceutical delivery device(s).

[0082] These and other features, aspects and advantages of the present invention will become better understood with regard to the following description, appended claims, and accompanying figures. The aforementioned elements of the invention may be individually combined or removed freely in order to make other embodiments of the invention, without any statement to object to such combination or removal hereinafter.

### BRIEF DESCRIPTION OF THE FIGURES

[0083] FIG. 1A and FIG. 1B show schematic representations of exemplary, multivalent CD20-binding molecules of the present invention that each comprise two CD20 binding regions. FIG. 1A shows schematic representations of exemplary, multivalent CD20-binding molecules of the invention where a small, vertical line may represent any suitable type of molecular association, such as, e.g., a single covalent bond like a disulfide bond or a linker, whether flexible or rigid; and a curved line may represent any suitable type of molecular association, such as, e.g., a flexible linker. FIG. 1B shows schematic representations of exemplary, multivalent CD20-binding molecules of the invention, which each comprise two CD20-binding regions derived from an immunoglobulin(s), and with examples of non-covalent, intermolecular associations as a result of intermolecular domain swapping between immunoglobulin-derived, CD20-binding regions. In FIG. 1B, the heavier weight lines represent any suitable type of molecular association, such as, e.g., a covalent bond or linker; and the lighter weight lines represent connections between immunoglobulin-derived domains of a CD20 binding region component, such as, e.g., a single covalent bond or a fifty amino acid residue linker. The schematic representations in FIG. 1A and FIG. 1B show exemplary forms of the multivalent CD20-binding molecules of the present invention that may represent different structural forms, including monomeric, heterodimeric, and/or homodimeric forms, such as, e.g., a homodimeric form stabilized by an inter-polypeptide disulfide bond(s) between two components of the molecule (e.g., Shiga toxin A Subunit effector regions and/or CD20 binding regions).

[0084] FIG. 2 graphically shows the sizes of different, exemplary, multivalent CD20-binding molecules of the present invention in different, exemplary compositions of the present invention analyzed by size exclusion chromatography (SEC). In addition, FIG. 2 shows the purity of different, exemplary compositions of the present invention as analyzed by SEC. For the SEC analysis of three different samples, the absorbance of ultraviolet light at 280 nanometers (nm) of the material eluted after flowing through a SEC column in milli-absorbance units (mAU) was plotted over the elution volume (mL).

[0085] FIG. 3 shows a Coomassie-stained, sodium dodecyl sulfate, polyacrylamide gel after electrophoresis of exemplary, multivalent CD20-binding molecules of the present invention from exemplary, multivalent CD20-binding molecules compositions of the present invention prepared in either reducing or non-reducing conditions. FIG. 3 shows the sizes of different, exemplary, multivalent CD20-binding molecules of the present invention analyzed by gel electrophoresis and the relative amounts or purity of proteinaceous molecules present in different, exemplary compositions of the present invention.

[0086] FIG. 4 graphically shows the binding affinity characteristics of exemplary, multivalent CD20-binding molecule compositions of the present invention and a monovalent CD20-binding protein composition to CD20 positive (CD20+) human tumor-derived, cells. The mean fluorescent intensity representing the amount of cell-bound, CD20-binding protein was plotted over the sample concentration of multivalent CD20-binding protein in nanograms per milliliter (ng/mL) analyzed.

[0087] FIG. 5 graphically shows the ribosomal inhibitory activity of different, exemplary, multivalent CD20-binding molecules of the present invention and a monovalent CD20-binding protein in percent of zero inhibition of protein synthesis in an in vitro translation assay. The percentage of protein synthesis of zero protein synthesis activity was plotted over the logarithm to base 10 of the molar concentration in picomolar of Shiga toxin component(s) present in each sample analyzed.

[0088] FIG. 6 graphically shows the cytotoxicities of exemplary, multivalent CD20-binding molecule compositions to CD20+ human derived tumor cells as compared to the cytotoxicity of a composition comprising the monovalent, CD20-binding protein component of the exemplary multivalent CD20-binding molecules of those exemplary, multivalent CD20-binding molecule compositions. The percentage of viable cells was plotted over the logarithm to base 10 of CD20-binding protein concentration in nanograms per milliliter (ng/mL).

[0089] FIG. 7 graphically shows the cytotoxicity of an exemplary, multivalent CD20-binding molecule composition to CD20+ human tumor-derived, cells as compared to a composition comprising the monovalent, CD20-binding protein component of the exemplary multivalent CD20-binding molecule(s) of that exemplary, multivalent CD20-binding molecule composition. In addition, FIG. 7 shows the cytotoxicity of a composition comprising a mixture of monovalent and multivalent CD20-binding molecules. The percent viability of cells was plotted over the logarithm to base 10 of CD20-binding protein concentration in nanograms per milliliter (ng/mL).

[0090] FIG. 8 graphically shows the cytotoxicities of various, fixed-ratio mixtures of purified, CD20-binding protein compositions to CD20+ human tumor-derived, cells. The percent viability of cells was plotted over the logarithm to base 10 of CD20-binding protein concentration in nanograms per milliliter (ng/mL).

[0091] FIG. 9 graphically shows the cytotoxicities of an exemplary, multivalent CD20-binding protein composition and fixed-ratio mixtures of purified, CD20-binding protein compositions to CD20 negative (CD20−) human tumor-derived, cells. The percent viability of cells was plotted over the logarithm to base 10 of CD20-binding protein concentration in nanograms per milliliter (ng/mL).

[0092] FIG. 10 graphically shows the cytotoxicities (in CD₅₀ concentrations) to CD20+ human tumor-derived, cells of different, multivalent CD20-binding protein compositions which varied in their proportions of multivalent CD20-binding molecule(s) to monovalent CD20-binding protein. CD₅₀ values in nanograms per milliliter (ng/mL) of different, fixed-ratio, CD20-binding protein mixtures were plotted over the protein concentration percentages of multivalent (αCD20-scFv::SLT-1A)₂ composition present in the sample tested. In addition, FIG. 10 shows a line which was fit to the data points using linear regression statistical modeling and the resulting coefficient of determination (R squared) of that line fit.

[0093] FIG. 11 graphically shows the cytotoxicities (in CD₅₀ concentrations) to CD20+ human tumor-derived, cells of different, multivalent CD20-binding protein compositions which varied in their proportions of multivalent CD20-binding molecule(s) to monovalent CD20-binding protein. CD₅₀ values in nanograms per milliliter (ng/mL) of different, fixed ratio, CD20-binding protein mixtures were graphed over the protein concentration percentages of multivalent (αCD20-scFv::SLT-1A)₂ composition present in the sample tested.

[0094] FIG. 12A, FIG. 12B, and FIG. 12C graphically show the sizes and proportions of molecules present in different, exemplary, multivalent CD20-binding molecule compositions of the present invention analyzed by size exclusion chromatography (SEC). For the SEC analysis, the absorbance of ultraviolet light at 280 nm of the material eluted after flowing through a SEC column was plotted in milli-absorbance units (mAU) over the elution time (minutes). Software was used to identify individual peaks in the 280 nm trace and the retention time of each peak's maximum absorbance of ultraviolet light at 280 nm.

### DETAILED DESCRIPTION

[0095] The present invention is described more fully hereinafter using illustrative, non-limiting embodiments, and references to the accompanying figures. This invention may, however, be embodied in many different forms and should not be construed as to be limited to the embodiments set forth below. Rather, these embodiments are provided so that this disclosure is thorough and conveys the scope of the invention to those skilled in the art.

[0096] In order that the present invention may be more readily understood, certain terms are defined below. Additional definitions may be found within the detailed description of the invention.

[0097] As used in the specification and the appended claims, the terms “a,” “an” and “the” include both singular and the plural referents unless the context clearly dictates otherwise.

[0098] As used in the specification and the appended claims, the term “and/or” when referring to two species, A and B, means at least one of A and B. As used in the specification and the appended claims, the term “and/or” when referring to greater than two species, such as A, B, and C, means at least one of A, B, or C, or at least one of any combination of A, B, or C (with each species in singular or multiple possibility).

[0099] Throughout this specification, the word “comprise” or variations such as “comprises” or “comprising” will be understood to imply the inclusion of a stated integer (or components) or group of integers (or components), but not the exclusion of any other integer (or components) or group of integers (or components).

[0100] Throughout this specification, the term “including” is used to mean “including but not limited to.” “Including” and “including but not limited to” are used interchangeably.

[0101] The term “amino acid residue” or “amino acid” includes reference to an amino acid that is incorporated into a protein, polypeptide, or peptide. The term “polypeptide” includes any polymer of amino acids or amino acid residues. The term “polypeptide sequence” refers to a series of amino acids or amino acid residues from which a polypeptide is physically composed. A “protein” is a macromolecule comprising one or more polypeptides or polypeptide “chains.” A “peptide” is a small polypeptide of sizes less than about 15 to 20 amino acid residues. The term “amino acid sequence” refers to a series of amino acids or amino acid residues which physically comprise a peptide or polypeptide depending on the length. Unless otherwise indicated, polypeptide and protein sequences disclosed herein are written from left to right representing their order from an amino terminus to a carboxy terminus.

[0102] The terms “amino acid,” “amino acid residue,” “amino acid sequence,” or polypeptide sequence include naturally occurring amino acids (including L and D isosteriomers) and, unless otherwise limited, also include known analogs of natural amino acids that can function in a similar manner as naturally occurring amino acids, such as, e.g., selenocysteine, pyrrolysine, N-formylmethionine, gamma-carboxyglutamate, hydroxyprolinehypusine, pyroglutamic acid, and selenomethionine (see e.g. Nagata K et al., Bioinformatics 30: 1681-9 (2014)). The amino acids referred to herein are described by shorthand designations as follows in Table A:

TABLE A
Amino Acid Nomenclature

| Name | 3-letter | 1-letter |
|---|---|---|
| Alanine | Ala | A |
| Arginine | Arg | R |
| Asparagine | Asn | N |
| Aspartic Acid or Aspartate | Asp | D |
| Cysteine | Cys | C |
| Glutamic Acid or Glutamate | Glu | E |
| Glutamine | Gln | Q |
| Glycine | Gly | G |
| Histidine | His | H |
| Isoleucine | Ile | I |
| Leucine | Leu | L |
| Lysine | Lys | K |
| Methionine | Met | M |
| Phenylalanine | Phe | F |
| Proline | Pro | P |
| Serine | Ser | S |
| Threonine | Thr | T |
| Tryptophan | Trp | W |
| Tyrosine | Tyr | Y |
| Valine | Val | V |

[0103] The phrase “conservative substitution” with regard to a polypeptide, refers to a change in the amino acid composition of the polypeptide that does not substantially alter the function and structure of the overall polypeptide (see Creighton, Proteins: Structures and Molecular Properties (W. H. Freeman and Company, New York (2nd ed., 1992)).

[0104] As used herein, the terms “expressed,” “expressing,” or “expresses,” and grammatical variants thereof, refer to translation of a polynucleotide or nucleic acid into a polypeptide and/or protein. The expressed polypeptides or proteins may remain intracellular, become a component of the cell surface membrane or be secreted into an extracellular space.

[0105] As used herein, the meaning of the phrase “CD20-expressing cell” encompasses any cell that expresses, at a cellular surface, a CD20 molecule which comprises a transmembrane domain.

[0106] As used herein, cells which express a significant amount of CD20 at least one cellular surface are “CD20 positive cells” or “CD20+ cells” and are cells physically coupled to the extracellular target biomolecule CD20. A significant amount of CD20 is defined below in Section III-B.

[0107] As used herein, the symbol “α” is shorthand for an immunoglobulin-type binding region capable of binding to the biomolecule following the symbol. The symbol “α” is used to refer to the functional characteristic of an immunoglobulin-type binding region based on its capability of binding to the biomolecule following the symbol.

[0108] The terms “associated,” “associating,” “linked,” or “linking” with regard to the claimed invention refers to the state of two or more components of a molecule being joined, attached, connected, or otherwise coupled to form a single molecule or the act of making two molecules associated with each other to form a single molecule by creating an association, linkage, attachment, and/or any other connection between the two molecules. For example, the term “linked” may refer to two or more components associated by one or more atomic interactions such that a single molecule is formed and wherein the atomic interactions may be covalent and/or non-covalent. Non-limiting examples of covalent associations between two components include peptide bonds and cysteine-cysteine disulfide bonds. Non-limiting examples of non-covalent associations between two molecular components include ionic bonds.

[0109] For purposes of the present invention, the term “linked” refer to two or more molecular components associated by one or more atomic interactions such that a single molecule is formed and wherein the atomic interaction includes at least one covalent bond. For purposes of the present invention, the term “linking” refers to the act of creating a linked molecule as described above.

[0110] For purposes of the present invention, the term “fused” refers to two or more proteinaceous components associated by at least one covalent bond which is a peptide bond, regardless of whether the peptide bond involves the carbon of a carboxyl acid group or involves another carbon, such as, e.g., the α-carbon, β-carbon, γ-carbon, σ-carbon, etc. Non-limiting examples of two proteinaceous components fused together include, e.g., an amino acid, peptide, or polypeptide fused to a polypeptide via a peptide bond such that the resulting molecule is a single, continuous polypeptide. For purposes of the present invention, the term “fusing” refers to the act of creating a fused molecule as described above, such as, e.g., a fusion protein generated from the recombinant fusion of genetic regions.

[0111] The symbol “::” means the polypeptide regions before and after it are physically linked together to form a continuous polypeptide.

[0112] For purposes of the present invention, the term “effector” means providing a biological activity, such as cytotoxicity, biological signaling, enzymatic catalysis, subcellular routing, and/or intermolecular binding resulting in the recruitment of one or more factors and/or allosteric effect(s).

[0113] As used herein, the phrase “multivalent CD20-binding molecule” refers to a CD20-binding molecule or plurality of CD20-binding molecules comprising two or more high-affinity CD20 binding regions, such as, e.g. a protein comprising two or more CD20 binding regions where each individual binding region has a dissociation constant of 10⁻⁵ to 10⁻¹² moles per liter toward an extracellular part of CD20.

[0114] As used herein, the phrase “multivalent CD20-binding protein” refers to a CD20-binding protein molecule or plurality of CD20-binding protein molecules comprising two or more high-affinity CD20 binding regions, such as, e.g. a protein comprising two or more CD20 binding regions where each individual binding region has a dissociation constant of 10⁻⁵ to 10⁻¹² moles/liter toward an extracellular part of CD20.

[0115] For purposes of the claimed invention and with regard to a Shiga toxin protein sequence, the term “wild-type” generally refers to a naturally occurring, Shiga toxin protein sequence(s) found in a living species, such as, e.g., a pathogenic bacterium, wherein that Shiga toxin protein sequence(s) is one of the most frequently occurring variants. This is in contrast to infrequently occurring Shiga toxin protein sequences that, while still naturally occurring, are found in less than one percent of individual organisms of a given species out of individual organisms of that same species when sampling a statistically powerful number of naturally occurring individual organisms of that species which comprise at least one Shiga toxin protein variant. A clonal expansion of a natural isolate outside its natural environment (regardless of whether the isolate is an organism or molecule comprising biological sequence information) does not alter the naturally occurring requirement as long as the clonal expansion does not introduce new sequence variety not present in naturally occurring populations of that species and/or does not change the relative proportions of sequence variants to each other.

[0116] For purposes of the present invention, the phrase “derived from” means that the polypeptide region comprises amino acid sequences originally found in a protein and which may now comprise additions, deletions, truncations, rearrangements, or other alterations relative to the original sequence as long as the overall function and structure are substantially conserved.

[0117] For purposes of the present invention, a Shiga toxin effector function is a biological activity conferred by a polypeptide region derived from a Shiga toxin A Subunit. Non-limiting examples of Shiga toxin effector functions include cellular internalization, subcellular routing, catalytic activity, and cytotoxicity. Shiga toxin catalytic activities include, for example, ribosome inactivation, protein synthesis inhibition, N-glycosidase activity, polynucleotide:adenosine glycosidase activity, RNAase activity, and DNAase activity. Shiga toxins are ribosome inactivating proteins (RIPs). RIPs can depurinate nucleic acids, polynucleosides, polynucleotides, rRNA, ssDNA, dsDNA, mRNA (and polyA), and viral nucleic acids (see e.g. Brigotti M et al., Toxicon 39: 341-8 (2001); Brigotti M et al., FASEB J 16: 365-72 (2002)). Some RIPs show antiviral activity and superoxide dismutase activity. Shiga toxin catalytic activities have been observed both in vitro and in vivo. Non-limiting examples of assays for Shiga toxin effector activity measure protein synthesis inhibitory activity, depurination activity, inhibition of cell growth, cytotoxicity, supercoiled DNA relaxation activity, and nuclease activity.

[0118] As used herein, the retention of Shiga toxin effector function refers to a level of Shiga toxin functional activity, as measured by an appropriate quantitative assay with reproducibility comparable to a wild-type Shiga toxin effector polypeptide region control. For ribosome inhibition, Shiga toxin effector function is exhibiting an IC₅₀ of 10,000 picomolar (pM) or less. For cytotoxicity in a target positive cell kill assay, Shiga toxin effector function is exhibiting a CD₅₀ of 1,000 nanomolar (nM) or less, depending on the cell type and its expression of the appropriate extracellular CD20 target biomolecule.

[0119] As used herein, the retention of “significant” Shiga toxin effector function refers to a level of Shiga toxin functional activity, as measured by an appropriate quantitative assay with reproducibility comparable to a wild-type Shiga toxin effector polypeptide control. For in vitro ribosome inhibition, significant Shiga toxin effector function is exhibiting an IC₅₀ of 300 pM or less depending on the source of the ribosomes (e.g. bacteria, archaea, or eukaryote (algae, fungi, plants, or animals)). This is significantly greater inhibition as compared to the approximate IC₅₀ of 100,000 pM for the catalytically inactive SLT-1A 1-251 double mutant (Y77S/E167D). For cytotoxicity in a target positive cell kill assay in laboratory cell culture, significant Shiga toxin effector function is exhibiting a CD₅₀ of 100, 50, or 30 nM or less, depending on the cell line and its expression of the appropriate extracellular CD20 target biomolecule. This is significantly greater cytotoxicity to the appropriate target cell line as compared to an SLT-1A subunit alone, without a cell targeting binding region, which has a CD₅₀ of 100-10,000 nM, depending on the cell line.

[0120] For some samples, accurate values for either IC₅₀ or CD₅₀ might be unobtainable due to the inability to collect the required data points for an accurate curve fit. For example, theoretically, neither an IC₅₀ nor CD₅₀ can be determined if greater than 50% ribosome inhibition or cell death, respectively, does not occur in a concentration series for a given sample. Inaccurate IC₅₀ and/or CD₅₀ values should not be considered when determining significant Shiga toxin effector function activity. Data insufficient to accurately fit a curve as described in the analysis of the data from exemplary Shiga toxin effector function assays, such as, e.g., assays described in the Examples, infra, should not be considered as representative of actual Shiga toxin effector function.

[0121] A failure to detect activity in Shiga toxin effector function may be due to improper expression, polypeptide folding, and/or polypeptide stability rather than a lack of cell entry, subcellular routing, and/or enzymatic activity. Assays for Shiga toxin effector functions may not require much multivalent CD20-binding molecule of the invention to measure significant amounts of Shiga toxin effector function activity. To the extent that an underlying cause of low or no effector function is determined empirically to relate to protein expression or stability, one of skill in the art may be able to compensate for such factors using protein chemistry and molecular engineering techniques known in the art, such that a Shiga toxin functional effector activity may be restored and measured. As examples, improper cell-based expression may be compensated for by using different expression control sequences; improper polypeptide folding and/or stability may benefit from stabilizing terminal sequences, or compensatory mutations in non-effector regions which stabilize the three-dimensional structure of the protein, etc. When new assays for individual Shiga toxin functions become available, Shiga toxin effector regions or polypeptides may be analyzed for any level of those Shiga toxin effector functions, such as for being within a certain-fold activity of a wild-type Shiga toxin effector polypeptide. Examples of meaningful activity differences are, e.g., Shiga toxin effector polypeptide regions that have 1000-fold or 100-fold or less the activity of a wild-type Shiga toxin effector polypeptide; or that have 3-fold to 30-fold or more activity compared to a functional knock-down or knockout Shiga toxin effector polypeptide.

[0122] Certain Shiga toxin effector functions are not easily measurable, e.g. subcellular routing functions. Currently there is no routine, quantitative assay to distinguish whether the failure of a Shiga toxin effector polypeptide to be cytotoxic is due to improper subcellular routing, but at a time when tests are available, Shiga toxin effector polypeptides may be analyzed for any significant level of subcellular routing as compared to the appropriate wild-type Shiga toxin effector polypeptide region.

[0123] It should be noted that even if the cytotoxicity of a Shiga toxin effector polypeptide is reduced relative to wild-type, in practice, applications using attenuated, Shiga toxin effector polypeptides may be equally or more effective than those using wild-type, Shiga toxin effector polypeptides because the highest potency variants might exhibit undesirable effects which are minimized or reduced in reduced-potency variants. Wild-type Shiga toxin effector polypeptides are very potent, being able to kill with only one molecule reaching the cytosol or perhaps 40 molecules being internalized (Tam P, Lingwood C, Microbiology 153: 2700-10 (2007)). Shiga toxin effector polypeptides with even considerably reduced Shiga toxin effector functions, such as, e.g., subcellular routing or cytotoxicity, as compared to wild-type Shiga toxin effector polypeptides may still be potent enough for practical applications involving targeted cell killing and/or detection of certain subcellular compartments of specific cell types. And such effector polypeptides may also be useful for delivering cargos (e.g. additional exogenous material) to certain intracellular locations or subcellular compartments.

[0124] The term “selective cytotoxicity” with regard to the cytotoxic activity of a cytotoxic, multivalent CD20-binding molecule refers to the relative levels of cytotoxicity between a targeted cell population and a non-targeted bystander cell population, which can be expressed as a ratio of the half-maximal cytotoxic concentration (CD₅₀) for a targeted cell type over the CD₅₀ for an untargeted cell type to show the preferentially of cell killing of the targeted cell type as a metric for selectivity.

[0125] As used in the specification and the claims herein, the phrase “physiological temperature appropriate for the cell” refers to temperatures known in the art and/or identifiable by the skilled worker which fall within a range suitable for healthy growth, propagation, and/or function of that particular cell or cell type; corresponding to the core temperature of the species from which the cell is derived; and/or corresponding to a healthy, living organism comprising the cell. For example, temperatures around 37° C. are appropriate for many mammalian cells depending on the species.

[0126] For purposes of the present invention, the phrase “internalization of a molecular complex comprising the multivalent CD20-binding molecule bound to CD20” means the cellular internalization of the multivalent CD20-binding molecule is CD20-mediated in that the internalization begins with multivalent CD20-binding molecule and cell-surface CD20 forming a complex at an extracellular position and ends with both the multivalent CD20-binding molecule and CD20 molecule(s) entering the cell prior to dissociation of the multivalent CD20-binding molecule from CD20 molecule(s) to which the multivalent CD20-binding molecule has bound.

[0127] For purposes of the present invention, the phrase “CD20 natively present on the surface of a cell” means a cell expresses the CD20 molecule using its own protein synthesis machinery and localizes the CD20 molecule to a cellular surface using its own intracellular routing machinery such that the CD20 molecule is physically coupled to said cell and at least a part of the CD20 molecule is accessible from an extracellular space, i.e. on the surface of a cell.

[0128] For the purposes of certain embodiments of the present invention, cellular internalization is considered rapid if the time for internalization to occur due to the binding of the multivalent CD20-binding molecule of the present invention is reduced as compared to the time for internalization of a prior art reference molecule at the same percent CD20 occupancy as determined by the same assay using the same cell type at the same temperature.

[0129] As used in the specification and the claims herein, the phrase “rapid cellular internalization” refers to the ability of a multivalent CD20-binding molecule of the present invention to decrease the time on average for cellular internalization of an extracellular CD20 antigen or cell surface localized CD20 molecule as compared to the time on average required for cellular internalization of an extracellular CD20 antigen or cell surface localized CD20 molecule, as measured by any one of a number of cell internalization assays known in the art or described herein.

[0130] As used in the specification and the claims herein, the phrase “rapid internalization” includes internalization which may be assayed as compared to a basal CD20 internalization rate and/or molecular binding induced internalization rate for CD20 after administration of an immunoglobulin-type binding molecule (e.g. a monoclonal antibody) known in the art to bind an extracellular part of CD20. The scope of the phrase “rapid cellular internalization” is intended to encompass internalization rates, on average, faster than those observed when testing a CD20-specific antibody or immunoglobulin-derived protein molecule with an Fc region. In general, an internalization rate constant may be defined as the time after administration of a CD20-specific binding molecule of interest to CD20 positive cells at which 50% of cell surface CD20 antigens, CD20 molecules, and/or the CD20-specific binding molecule is internalized at a given administered concentration, mass, molarity, or CD20 occupancy-adjusted concentration, to a particular cell type, and at a particular temperature. Cell-surface CD20 internalization, whether basally or in response to administration of a CD20-binding molecule, may be assayed by various methods known to the skilled worker (see e.g. Press O et al., Blood. 83: 1390-7 (1994); Golay J et al., Blood 98: 3383-9 (2001); Goulet A et al., Blood 90: 2364-75 (1997); Manches O et al., Blood 101: 949-54 (2003); Hess G et al., Biochim Biophys Acta 1773: 1583-8 (2007); Baskar S et al., Clin Cancer Res 14: 396-404 (2008); Luqman Metal., Blood 112: 711-20 (2008)).

[0131] For the purposes of certain embodiments of the present invention, cellular internalization is considered rapid if the time for internalization to occur due to the binding of the multivalent CD20-binding molecule of the present invention is reduced as compared to the time for internalization of the target CD20 molecule with the binding of a well-characterized antibody recognizing a CD20 antigen, such as the αCD20 monoclonal antibody 1H4 (Haisma H et al., Blood 92: 184-90 (1999)). For example, internalization timing for the CD20 antigen, although variable for cell type and antibody type, does not typically begin to reach maximal levels until approximately six hours or more after binding. Thus the term “rapid” as used throughout the present description is intended to indicate that a multivalent CD20-binding molecule of the present invention enters one or more CD20-expressing and/or CD20 positive cells in less than six hours. In certain embodiments, rapid can be as quickly as less than about thirty minutes, but can also encompass a range of from about 1 hour to about 2 hours, to about 3 hours, to about 4 hours, to about 5 hours; a range of about 2 hours to about 3 hours, to about 4 hours, to about 5 hours; a range of about 3 hours to about 4 hours, to about 5 hours; and a range of about 4 hours to about 5 hours.

[0132] For purposes of the present invention, the phrase “one or more non-covalent linkages,” with regard to a molecule comprising two or more components linked together, includes the types of linkages connecting the components that in certain molecules may be observed as being eliminated (i.e., no longer connecting two or more components) when changing the molecule from native protein-folding conditions to protein-denaturing conditions. For example, when using techniques known in the art and/or described herein, such as, e.g., electrophoretic and/or chromatographic assays, for assaying the sizes of proteinaceous molecules, a multi-component molecule that appears as a single-sized species under native protein-folding conditions (e.g. pH-buffered environments intended to be similar to the lumen of the endoplasmic reticulum of a eukaryotic cell or to an extracellular environment within an organism), can also be observed as being composed of two or more smaller-sized, proteinaceous molecules under denaturing conditions and/or after being subjected to a denaturing condition. “Protein-denaturing” conditions are known to the skilled worker and include conditions markedly different from native protein-folding conditions, such as, e.g., environments with a high temperature (e.g., greater than 50 degrees Celsius) and/or those characterized by the presence of chemical denaturants and/or detergents, such as, e.g., 1-10% sodium dodecyl sulfate, polysorbates, Triton® X-100, sarkosyl, and other detergents whether ionic, non-ionic, zwitterionic, and/or chaotropic.

[0133] As used herein, the term “monomeric” with regard to describing a protein and/or proteinaceous molecule refers to a molecule comprising only one polypeptide component consisting of a single, continuous polypeptide, regardless of its secondary or tertiary structure, which may be synthesized by a ribosome from a single polynucleotide template, including a continuous linear polypeptide which later forms a cyclic structure. In contrast, a multimeric molecule may comprise two or more polypeptides (e.g. subunits) which together do not form a single, continuous polypeptide that may be synthesized by a ribosome from a single polynucleotide template is multimeric.

[0134] As used herein, the term “multimeric” with regard to describing a protein and/or proteinaceous molecule refers to a molecule that comprises two or more, individual, polypeptide components associated together and/or linked together, such as, e.g., a molecule consisting of two components each of which is its own continuous polypeptide. For example, the association or linkage between components of a molecule may include 1) one or more non-covalent interactions; 2) one or more post-translational, covalent interactions; 3) one or more, covalent chemical conjugations; and/or 4) one or more covalent interactions resulting in a single molecule comprising a non-linear polypeptide, such as, e.g., a branched or cyclic polypeptide structure, resulting from the arrangement of the two or more polypeptide components. A molecule comprising two, discontinuous polypeptides as a result of the proteolytic cleavage of one or more peptide bonds in a single, continuous polypeptide synthesized by a ribosome from a single polynucleotide templates is “multimeric” and not “monomeric.”

[0135] As used herein, the phrase “CD20-binding molecule composition” refers to a composition comprising at least one type of CD20-binding molecule, and, may commonly comprise two or more types of CD20-binding molecule, wherein each type of CD20-binding molecule has a reproducibly measurable representation in the composition, e.g., of at least one percent (by mass) of the most abundant type of CD20-binding molecule. A composition comprising only one type of CD20-binding molecule with no other type of proteinaceous molecule present (e.g. a composition comprising one hundred percent of a single type of CD20-binding molecule of the total proteinaceous molecule(s) present) is encompassed by the phrase “CD20-binding molecule composition.”

### INTRODUCTION

[0136] The present invention provides multivalent CD20-binding molecules comprising Shiga-toxin-Subunit-A derived regions associated with multiple, heterologous, CD20 binding regions for cell targeting. In addition, the present invention provides compositions enriched for multivalent CD20-binding molecules of the present invention (e.g. a composition comprising a relatively large proportion of multivalent CD20-binding molecule relative to monovalent CD20-binding molecule). The present invention is based on the discovery that several, multivalent CD20-binding molecules were much more cytotoxic to CD20-expressing cells than a monovalent CD20-binding protein component in a way that was not predictable from differences in binding affinity to CD20-expressing cells and/or CD20-binding valence (see Examples, infra).

[0137] As described in more detail in the Examples, certain, exemplary, multivalent CD20-binding molecules, and compositions thereof, exhibited unexpectedly large cytotoxic potencies compared to what was measured using equivalent amounts of a monovalent CD20-binding variant, and certain compositions thereof. Without being bound by theory, the multivalent CD20-binding molecules of the present invention, and compositions thereof, may possess the improved ability(ies) of: internalizing into CD20-expressing cells, intracellularly routing to a certain subcellular compartment(s), and/or delivering an active toxin effector polypeptide region (e.g., a Shiga toxin A Subunit effector polypeptide) to the cytosol as compared to certain 1) monovalent CD20-binding molecules and compositions thereof, 2) multivalent CD20-binding molecules lacking a toxin effector region(s) (e.g., a Shiga toxin A Subunit effector polypeptide), and/or compositions comprising high-proportions of monovalent CD20-binding molecule(s) comprising Shiga toxin A Subunit effector polypeptide(s) to total CD20-binding molecule.

### I. The General Structure of the Multivalent CD20-Binding Molecules of the Present Invention

[0138] The present invention provides various multivalent CD20-binding molecules for targeted cellular internalization into CD20-expressing cell types. A CD20-binding molecule of the present invention comprises 1) two or more CD20 binding regions, each capable of specifically binding an extracellular part of CD20, and 2) at least one Shiga toxin effector region comprising a polypeptide derived from the amino acid sequence of an A Subunit of at least one member of the Shiga toxin family. The linking of multiple cell targeting CD20 binding regions with Shiga-toxin-Subunit-A-derived regions enables the specific targeting of the potent Shiga toxin cytotoxicity to CD20+ cell types. The present invention also provides various compositions comprising large-proportions of multivalent CD20-binding molecules of the present invention for applications involving targeting cellular internalization into CD20-expressing cell types.

[0139] Certain multivalent CD20-binding molecules of the present invention, and compositions thereof, are cytotoxic and others are not, such as, e.g., for labeling the interiors of CD20-expressing cells. Certain multivalent CD20-binding molecules of the present invention, and compositions thereof, can deliver additional exogenous materials into CD20-expressing cells and may or may not result in cytotoxicity independent of the activity of the Shiga toxin effector polypeptide region(s).

### A. CD20 Binding Regions of a Multivalent CD20-Binding Molecule of the Present Invention

[0140] The multivalent CD20-binding molecule of the present invention comprises two or more CD20 binding regions wherein each binding region comprises a peptide or polypeptide region capable of binding specifically to an extracellular part of a CD20 molecule. In certain embodiments, the multivalent CD20-binding molecule of the present invention comprises two or more CD20 binding regions wherein each binding region comprises a peptide or polypeptide region capable of binding specifically to an extracellular part of a CD20 molecule in physical association with a cell. The CD20 binding region may comprise one or more various peptidic or polypeptide moieties, such as randomly generated peptide sequences, naturally occurring ligands or derivatives thereof, immunoglobulin-derived domains, engineered scaffolds as alternatives to immunoglobulin domains, and the like.

[0141] In certain embodiments of the present invention, the CD20 binding region comprises the polypeptide comprising the binding region selected from the group which includes autonomous V_{H} domains, single-domain antibody domains (sdAbs), heavy-chain antibody domains derived from camelids (V_{H}H fragments or V_{H} domain fragments), heavy-chain antibody domains derived from camelid V_{H}H fragments or V_{H} domain fragments, heavy-chain antibody domains derived from cartilaginous fishes, immunoglobulin new antigen receptors (IgNARs), V_{NAR} fragments, single-chain variable (scFv) fragments, nanobodies, Fd fragments consisting of the heavy chain and C_{H}1 domains, permutated Fvs (pFv), single chain Fv-C_{H}3 minibodies, dimeric C_{H}2 domain fragments (C_{H}2 D), Fc antigen binding domains (Fcabs), isolated complementary determining region 3 (CDR3) fragments, constrained framework region 3, CDR3, framework region 4 (FR3-CDR3-FR4) polypeptides, small modular immunopharmaceutical (SMIP) domains, scFv-Fc fusions, multimerizing scFv fragments (diabodies, triabodies, tetrabodies), disulfide stabilized antibody variable (Fv) fragments, disulfide stabilized antigen-binding (Fab) fragments consisting of the V_{L}, V_{H}, C_{L} and C_{H}1 domains, bivalent nanobodies, bivalent minibodies, bivalent F(ab′)₂ fragments (Fab dimers), bispecific tandem V_{H}H fragments, bispecific tandem scFv fragments, bispecific nanobodies, bispecific minibodies, and any genetically manipulated counterparts of the foregoing that retains its binding functionality (see e.g. Wörn A, Plückthun A, J Mol Biol 305: 989-1010 (2001); Xu L et al., Chem Biol 9: 933-42 (2002); Wikman M et al., Protein Eng Des Sel 17: 455-62 (2004); Binz H et al., Nat Biotechnol 23: 1257-68 (2005); Hey T et al., Trends Biotechnol 23:514-522 (2005); Holliger P, Hudson P, Nat Biotechnol 23: 1126-36 (2005); Gill D, Damle N, Curr Opin Biotech 17: 653-8 (2006); Koide A, Koide S, Methods Mol Biol 352: 95-109 (2007); Byla P et al., J Biol Chem 285: 12096 (2010); Zoller F et al., Molecules 16: 2467-85 (2011); Alfarano Petal., Protein Sci 21: 1298-314 (2012); Madhurantakam C et al., Protein Sci 21: 1015-28 (2012); Varadamsetty G et al., J Mol Biol 424: 68-87 (2012); Reichen C et al., J Struct Biol 185: 147-62 (2014)).

[0142] For purposes of the present invention, the term “CD20 binding region” refers to a proteinaceous (e.g., peptidic and/or polypeptide) region of a molecule of the present invention which is capable of specifically binding an extracellular part of a CD20 molecule with high affinity, such as, e.g., having a dissociation constant with regard to CD20 of 10⁻⁵ to 10⁻¹² moles per liter.

[0143] In certain embodiments, the binding region of a multivalent CD20-binding molecule of the present invention comprises a polypeptide capable of selectively and specifically binding an extracellular part of a CD20 expressed at a cellular surface and in physical association with a cell. In certain embodiments, the CD20 binding region comprises a naturally occurring ligand of a CD20 molecule or derivative thereof that retains binding functionality to an extracellular part of CD20. According to certain other embodiments, the CD20 binding region comprises a synthetic ligand capable of binding to an extracellular part of CD20 with high affinity.

[0144] While the name CD20 might refer to multiple proteins with related structures and polypeptide sequences from various species, for the purposes of the present invention, the term “CD20” refers to the B-lymphocyte antigen CD20 proteins present in mammals whose exact sequence might vary slightly based on the isoform and from individual to individual. Alternative names for CD20, as recognized in the art, include B-lymphocyte surface antigen B1, Leu-16 and Bp35. For example, in humans CD20 refers to the protein represented by the predominant polypeptide sequence UnitProt P11836 and NCBI accession NP 690605.1; however, different isoforms and variants may exist. The polypeptide sequences of CD20 proteins from various species have been described, such as from bats, cats, cattle, dogs, mice, marmosets, and rats, and can be predicted by bioinformatics in numerous other species based on genetic homology (e.g. CD20 has been predicted in various primates, including baboons, macaques, gibbons, chimpanzees, and gorillas) (see NCBI protein database (National Center for Biotechnology Information, U.S.)). A skilled worker will be able to identify a CD20 related protein in mammals, even if it differs from the referenced sequences.

[0145] CD20 is expressed by B-cells within certain cell developmental stages that give rise to non-Hodgkins lymphoma (NHL) and chronic lymphocytic leukemia (CLL); however, CD20 is not expressed on hematopoietic stem cells or on mature plasma cells (van Meerten T et al., Clin Cancer Res 12: 4027-35 (2006)). An attractive characteristic of CD20 is that it represents a quasi-universal target of lymphoma cells for being expressed on approximately 90% of B-cell non-Hodgkin lymphomas (Anderson K et al., Blood 63: 2825-33 (1984); Press O et al., Cancer Res 49: 4906-12 (1989); Press O et al., Blood. 83: 1390-7 (1994); Manches O et al., Blood 101: 949-54 (2003)). Additional attractive characteristics of CD20 are its high expression on the plasma membrane of lymphoma cells and its multiple extracellular CD20 antigenic epitopes in close proximity to the plasma membrane (Teeling J et al., J Immunol 177: 362-71 (2006); Lim S et al., Haematologica 95: 135-43 (2010)).

[0146] An extracellular part of a CD20 molecule refers to a portion of its structure exposed to the extracellular environment when the CD20 molecule is present in a cell membrane, such as, e.g., CD20 molecules natively expressed at a cellular surface. In this context, exposed to the extracellular environment means that part of the CD20 molecule is accessible by, e.g., an antibody or at least a binding moiety smaller than an antibody such as a single-domain antibody domain, a nanobody, a heavy-chain antibody domain derived from camelids or cartilaginous fishes, a single-chain variable fragment, or any number of engineered alternative scaffolds to immunoglobulins (see below). The exposure to the extracellular environment of or accessibility to a part of CD20 physically coupled to a cell may be empirically determined by the skilled worker using methods well known in the art. Note that some portion of CD20, which was predicted not to be accessible to an antibody in the extracellular space based on its epitope location within CD20, was empirically shown to be accessible by a monoclonal antibody (Teeling J et al., J. Immunol. 177: 362-71 (2006)).

[0147] CD20 binding regions may be derived from antibody or antibody-like structures; however, alternative scaffolds from other sources are contemplated as a source of CD20 binding regions within the scope of the present invention. In certain embodiments, the CD20 binding region is derived from an immunoglobulin-derived binding region, such as an antibody paratope. In certain other embodiments, the CD20 binding region comprises an immunoglobulin-type binding region that is an engineered polypeptide not derived from any immunoglobulin domain.

[0148] According to one specific, but non-limiting aspect, the CD20 binding region may comprise an immunoglobulin-type binding region. The term “immunoglobulin-type binding region” as used herein refers to a polypeptide region capable of binding one or more target biomolecules, such as an antigen or epitope Immunoglobulin-type binding regions are functionally defined by their ability to bind to target molecules, and all the immunoglobulin-type binding regions of the present invention are capable of binding CD20 Immunoglobulin-type binding regions are commonly derived from antibody or antibody-like structures; however, alternative scaffolds from other sources are contemplated within the scope of the term.

[0149] Immunoglobulin (Ig) proteins have a structural domain known as an Ig domain. Ig domains range in length from about 70-110 amino acid residues and possess a characteristic Ig-fold, in which typically 7 to 9 antiparallel beta strands arrange into two beta sheets which form a sandwich-like structure. The Ig fold is stabilized by hydrophobic amino acid interactions on inner surfaces of the sandwich and highly conserved disulfide bonds between cysteine residues in the strands. Ig domains may be variable (IgV or V-set), constant (IgC or C-set) or intermediate (IgI or I-set). Some Ig domains may be associated with a complementarity determining region or complementary determining region (CDR), also referred to as antigen binding region (ABR), which is important for the specificity of antibodies binding to their epitopes. Ig-like domains are also found in non-immunoglobulin proteins and are classified on that basis as members of the Ig superfamily of proteins. The HUGO Gene Nomenclature Committee (HGNC) provides a list of members of the Ig-like domain containing family.

[0150] As used herein, the term “heavy chain variable (V_{H}) domain” or “light chain variable (V_{L}) domain” respectively refer to any antibody V_{H} or V_{L} domain (e.g. a human V_{H} or V_{L} domain) as well as any derivative thereof retaining at least qualitative antigen binding ability of the corresponding native antibody (e.g. a humanized V_{H} or V_{L} domain derived from a native murine V_{H} or V_{L} domain). A V_{H} or V_{L} domain consists of a “framework” region interrupted by the three CDRs or ABRs. The framework regions serve to align the CDRs for specific binding to an epitope of an antigen. From amino-terminus to carboxyl-terminus, both V_{H} and V_{L} domains comprise the following framework (FR) and CDR regions: FR1, CDR1, FR2, CDR2, FR3, CDR3, and 1-R4. For camelid V_{H}H fragments, IgNARs of cartilaginous fish, V_{NAR} fragments, and derivatives thereof, there is a single heavy chain variable domain comprising the same basic arrangement: FR1, CDR1, FR2, CDR2, FR3, CDR3, and 1-R4.

[0151] An immunoglobulin-type binding region may be a polypeptide sequence of antibody or antigen-binding fragment thereof wherein the amino acid sequence has been varied from that of a native antibody or an Ig-like domain of a non-immunoglobulin protein, for example by molecular engineering or library screening. Because of the relevance of recombinant DNA techniques and in vitro library screening in the generation of immunoglobulin-type binding regions, antibodies can be redesigned to obtain desired characteristics, such as smaller size, cell entry, or other therapeutic improvements. The possible variations are many and may range from the changing of just one amino acid to the complete redesign of, for example, a variable region. Typically, changes in the variable region will be made in order to improve the antigen-binding characteristics, improve variable region stability, or reduce the potential for immunogenic responses.

[0152] There are numerous immunoglobulin-type binding regions that bind an extracellular part of CD20 contemplated according to the present invention. In certain embodiments, the immunoglobulin-type binding region is derived from an immunoglobulin binding region, such as an antibody paratope capable of binding an extracellular part of CD20. In certain other embodiments, the immunoglobulin-type binding region comprises an engineered polypeptide not derived from any immunoglobulin domain but that functions like an immunoglobulin binding region by providing high-affinity binding to an extracellular part of CD20. This engineered polypeptide may optionally include polypeptide scaffolds comprising or consisting essentially of complementary determining regions from immunoglobulins as described herein.

[0153] There are numerous immunoglobulin-derived binding regions and non-immunoglobulin engineered polypeptides in the prior art that are useful for targeting the multivalent CD20-binding molecules of the present invention to CD20-expressing cells. In certain embodiments, the immunoglobulin-type binding region of the multivalent CD20-binding molecule of the invention is selected from the group which includes autonomous V_{H} domains, single-domain antibody domains (sdAbs), heavy-chain antibody domains derived from camelids (V_{H}H fragments or V_{H} domain fragments), heavy-chain antibody domains derived from camelid V_{H}H fragments or V_{H} domain fragments, heavy-chain antibody domains derived from cartilaginous fishes, immunoglobulin new antigen receptors (IgNARs), V_{NAR} fragments, single-chain variable (scFv) fragments, nanobodies, Fd fragments consisting of the heavy chain and C_{H}1 domains, permutated Fvs (pFvs), single chain Fv-C_{H}3 minibodies, dimeric C_{H}2 domain fragments (C_{H}2 D), Fc antigen binding domains (Fcabs), isolated complementary determining region 3 (CDR3) fragments, constrained framework region 3, CDR3, framework region 4 (FR3-CDR3-FR4) polypeptides, small modular immunopharmaceutical (SMIP) domains, scFv-Fc fusions, multimerizing scFv fragments (diabodies, triabodies, tetrabodies), disulfide stabilized antibody variable (Fv) fragments, disulfide stabilized antigen-binding (Fab) fragments consisting of the V_{L}, V_{H}, C_{L} and C_{H}1 domains, bivalent nanobodies, bivalent minibodies, bivalent F(ab′)₂ fragments (Fab dimers), bispecific tandem V_{H}H fragments, bispecific tandem scFv fragments, bispecific nanobodies, bispecific minibodies, and any genetically manipulated counterparts of the foregoing that retain its paratope and binding function (see Ward E et al., Nature 341: 544-6 (1989); Davies J, Riechmann L, Biotechnology (NY) 13: 475-9 (1995); Brinkmann U et al., J Mol Biol 268: 107-17 (1997); Reiter Y et al., Mol Biol 290: 685-98 (1999); Riechmann L, Muyldermans S, J Immunol Methods 231: 25-38 (1999); Tanha J et. al., J Immunol Methods 263: 97-109 (2002); Vranken W et al., Biochemistry 41: 8570-9 (2002); Jespers L et al., J Mol Biol 337: 893-903 (2004); Jespers L et al., Nat Biotechnol 22: 1161-5 (2004); To R et al., J Biol Chem 280: 41395-403 (2005); Saerens D et al., Curr Opin Pharmacol 8: 600-8 (2008); Dimitrov D, MAbs 1: 26-8 (2009); Weiner L, Cell 148: 1081-4 (2012); Ahmad Z et al., Clin Dev Immunol 2012: 980250 (2012)).

[0154] There are a variety of binding regions comprising polypeptides derived from the constant regions of immunoglobulins, such as, e.g., engineered dimeric Fc domains, monomeric Fcs (mFcs), scFv-Fcs, V_{H}H-Fcs, C_{H}2 domains, monomeric C_{H}3s domains (mC_{H}3s), synthetically reprogrammed immunoglobulin domains, and/or hybrid fusions of immunoglobulin domains with ligands (Hofer T et al., Proc Natl Acad Sci USA 105: 12451-6 (2008); Xiao J et al., J Am Chem Soc 131: 13616-13618 (2009); Xiao X et al., Biochem Biophys Res Commun 387: 387-92 (2009); Wozniak-Knopp G et al., Protein Eng Des Sel 23 289-97 (2010); Gong R et al., PLoS ONE 7: e42288 (2012); Wozniak-Knopp G et al., PLoS ONE 7: e30083 (2012); Ying T et al., J Biol Chem 287: 19399-408 (2012); Ying T et al., J Biol Chem 288: 25154-64 (2013); Chiang M et al., J Am Chem Soc 136: 3370-3 (2014); Rader C, Trends Biotechnol 32: 186-97 (2014) Ying T et al., Biochimica Biophys Acta 1844: 1977-82 (2014)).

[0155] In accordance with certain other embodiments, the binding region comprises an engineered, alternative scaffold to immunoglobulin domains. Engineered alternative scaffolds are known in the art which exhibit similar functional characteristics to immunoglobulin-derived structures, such as high-affinity and specific binding of target biomolecules, and may provide improved characteristics to certain immunoglobulin domains, such as, e.g., greater stability or reduced immunogenicity. Generally, alternative scaffolds to immunoglobulins are less than 20 kilodaltons (kDa), consist of a single polypeptide chain, lack cysteine residues, and exhibit relatively high thermodynamic stability.

[0156] For certain embodiments of the multivalent CD20-binding molecules of the present invention, the immunoglobulin-type binding region is selected from the group which includes engineered, Armadillo repeat polypeptides (ArmRPs); engineered, fibronectin-derived, 10^{th} fibronectin type III (10Fn3) domains (monobodies, AdNectins™, or AdNexins™); engineered, tenascin-derived, tenascin type III domains (Centryns™); engineered, ankyrin repeat motif containing polypeptides (DARPins™); engineered, low-density-lipoprotein-receptor-derived, A domains (LDLR-A) (Avimers™); lipocalins (anticalins); engineered, protease inhibitor-derived, Kunitz domains; engineered, Protein-A-derived, Z domains (Affibodies™); engineered, gamma-B crystalline-derived scaffold or engineered, ubiquitin-derived scaffolds (Affilins); Sac7d-derived polypeptides (Nanoffitins® or affitins); engineered, Fyn-derived, SH2 domains (Fynomers®); and engineered antibody mimics and any genetically manipulated counterparts of the foregoing that retains its binding functionality (Wörn A, Plückthun A, J Mol Biol 305: 989-1010 (2001); Xu L et al., Chem Biol 9: 933-42 (2002); Wikman M et al., Protein Eng Des Sel 17: 455-62 (2004); Binz H et al., Nat Biotechnol 23: 1257-68 (2005); Hey T et al., Trends Biotechnol 23:514-522 (2005); Holliger P, Hudson P, Nat Biotechnol 23: 1126-36 (2005); Gill D, Damle N, Curr Opin Biotech 17: 653-8 (2006); Koide A, Koide S, Methods Mol Biol 352: 95-109 (2007); Byla Petal., J Biol Chem 285: 12096 (2010); Zoller F et al., Molecules 16: 2467-85 (2011); Alfarano Petal., Protein Sci 21: 1298-314 (2012); Madhurantakam C et al., Protein Sci 21: 1015-28 (2012); Varadamsetty G et al., J Mol Biol 424: 68-87 (2012)). For example, the engineered Fn3(CD20) is an engineered, alternative scaffold CD20 binding region which exhibits high-affinity binding to CD20 expressing cells (Natarajan A et al., Clin Cancer Res 19: 6820-9 (2013)).

[0157] Among certain embodiments of the present invention, the immunoglobulin-type binding region is derived from a nanobody or single domain immunoglobulin-derived region V_{H}H. Generally, nanobodies are constructed from fragments of naturally occurring single, monomeric variable domain antibodies (sdAbs) of the sort found in camelids and cartilaginous fishes (Chondrichthyes). Nanobodies are engineered from these naturally occurring antibodies by truncating the single, monomeric variable domain to create smaller and more stable molecules, such as, e.g., IgNAR, V_{H}H, and V_{NAR} constructs. Due to their small size, nanobodies are able to bind to antigens that are not accessible to whole antibodies. Among certain embodiments of the present invention, the immunoglobulin-type binding region is derived from a nanobody or single domain immunoglobulin-derived region V_{H}H which exhibits high-affinity binding specifically to an extracellular part of CD20.

[0158] In accordance with certain other embodiments, the immunoglobulin-type binding region of the CD20-binding molecules of the present invention comprises an immunoglobulin-derived binding region that does not comprise an Fc region or any Fc region effector domain which retains an Fc region effector function. For certain embodiments of the multivalent CD20-binding molecules of the present invention, the multivalent CD20-binding molecule does not comprise an Fc region or Fc region effector domain which retains an Fc function (see examples of Fc functions below).

[0159] As used herein, the phrase “Fc region” refers to the fragment crystallizable region or Fc (Fragment, crystallizable region) which is a polypeptide domain present in immunoglobulins, such as, e.g., the immunoglobulin isotypes IgA, IgD, IgE, IgG, and IgM. Fc regions interact with the complement system of the immune system and/or Fc receptors present on immune cells, such as, e.g., T-cells, basophils, eosinophils, macrophagocytes (macrophages), mast cells, neutrophils, and natural killer cells (NK cells). Fc region effector functions include activating T-cells, stimulating the release of inflammatory mediators such as cytokines like TNF-alpha, initiating complement dependent cytotoxicity (CDC), antibody-dependent cytotoxicity (ADCC), eventual phagocytosis, and possible immunization effects. Fc regions may be engineered into recombinant polypeptides and proteins, such as, e.g., fusions of antigen-binding fragments and Fc regions in synthetic F(ab′)2 and Fcabs.

[0160] The CD20-binding molecules of the present invention that do not comprise any Fc region or Fc region effector domain which retains an Fc region effector function may function equally well in subjects with impaired Fc-FcyR-dependent mechanisms, such as immunocompromised patients, as in other subjects, such as immunocompetent patients.

[0161] Any of the above CD20 binding regions may be used as a component of the present invention as long as the CD20 binding region component has a dissociation constant of 10⁻⁵ to 10⁻¹² moles per liter, preferably less than 200 nM, towards an extracellular part of CD20. In certain embodiments, the multivalent CD20-binding molecule of the present invention comprises a toxin effector region derived from a proteinaceous toxin, such as, e.g., a Shiga toxin A Subunit of the Shiga toxin family.

### B. Shiga Toxin Effector Polypeptide of a Multivalent CD20-Binding Molecule of the Present Invention

[0162] For purposes of the present invention, the phrase “Shiga toxin effector region”, “Shiga toxin effector polypeptide”, or “Shiga toxin effector polypeptide region” refers to a polypeptide derived from a Shiga toxin A Subunit of at least one member of the Shiga toxin family wherein the Shiga toxin effector polypeptide is capable of exhibiting at least one Shiga toxin function. Shiga toxin functions include, e.g., promoting cell entry, deforming lipid membranes, stimulating clathrin-mediated endocytosis, directing retrograde transport, directing subcellular routing, avoiding intracellular degradation, catalytically inactivating ribosomes, effectuating cytotoxicity, and effectuating cytostatic effects.

[0163] A member of the Shiga toxin family refers to any member of a family of naturally occurring protein toxins which are structurally and functionally related, notably, toxins isolated from S. dysenteriae and E. coli (Johannes L, Römer W, Nat Rev Microbiol 8: 105-16 (2010)). For example, the Shiga toxin family encompasses true Shiga toxin (Stx) isolated from S. dysenteriae serotype 1, Shiga-like toxin 1 variants (SLT1 or Stx1 or SLT-1 or Slt-I) isolated from serotypes of enterohemorrhagic E. coli, and Shiga-like toxin 2 variants (SLT2 or Stx2 or SLT-2) isolated from serotypes of enterohemorrhagic E. coli. SLT1 differs by only one residue from Stx, and both have been referred to as Verocytotoxins or Verotoxins (VTs) (O'Brien A et al., Curr Top Microbiol Immunol 180: 65-94 (1992)). Although SLT1 and SLT2 variants are only about 53-60% similar to each other at the amino acid sequence level, they share mechanisms of enzymatic activity and cytotoxicity common to the members of the Shiga toxin family (Johannes, Nat Rev Microbiol 8: 105-16 (2010)). Over 39 different Shiga toxins have been described, such as the defined subtypes Stx1a, Stx1c, Stx1d, and Stx2a-g (Scheutz F et al., J Clin Microbiol 50: 2951-63 (2012)). Members of the Shiga toxin family are not naturally restricted to any bacterial species because Shiga-toxin-encoding genes can spread among bacterial species via horizontal gene transfer. As an example of interspecies transfer, a Shiga toxin was discovered in a strain of A. haemolyticus isolated from a patient (Grotiuz G et al., J Clin Microbiol 44: 3838-41 (2006)). Once a Shiga toxin encoding polynucleotide enters a new subspecies or species, the Shiga toxin amino acid sequence is presumed to be capable of developing slight sequence variations due to genetic drift and/or selective pressure while still maintaining a mechanism of cytotoxicity common to members of the Shiga toxin family.

[0164] Shiga toxin effector polypeptides of the multivalent CD20-binding molecules of the present invention comprise or consist essentially of a polypeptide derived from a Shiga toxin A Subunit dissociated from any form of its native Shiga toxin B Subunit. In addition, the multivalent CD20-binding molecules of the present invention do not comprise any polypeptide comprising or consisting essentially of a functional binding domain of a native Shiga toxin B subunit. Rather, the Shiga toxin A Subunit derived regions of the multivalent CD20-binding molecules are functionally associated with heterologous binding regions to effectuate cell targeting.

[0165] In certain embodiments, a Shiga toxin effector polypeptide of the multivalent CD20-binding molecules of the present invention may comprise or consist essentially of a full-length Shiga toxin A Subunit (e.g. SLT-1A (SEQ ID NO:1), StxA (SEQ ID NO:2), or SLT-2A (SEQ ID NO:3)), noting that naturally occurring Shiga toxin A Subunits may comprise precursor forms containing signal sequences of about 22 amino acids at their amino-terminals which are removed to produce mature Shiga toxin A Subunits and are recognizable to the skilled worker. In other embodiments, the Shiga toxin effector polypeptide of the invention comprises or consists essentially of a truncated Shiga toxin A Subunit which is shorter than a full-length Shiga toxin A Subunit.

[0166] Shiga-like toxin 1 A Subunit truncations are catalytically active, capable of enzymatically inactivating ribosomes in vitro, and cytotoxic when expressed within a cell. The smallest Shiga toxin A Subunit fragment exhibiting full enzymatic activity was shown to be a polypeptide composed of residues 1-239 of Slt1A. Although the smallest fragment of the Shiga toxin A Subunit reported to retain substantial catalytic activity was residues 75-247 of StxA, a StxA truncation expressed de novo within a eukaryotic cell requires only up to residue 240 to reach the cytosol and exert catalytic inactivation of ribosomes.

[0167] Shiga toxin effector polypeptides may commonly be smaller than a full-length Shiga toxin A Subunit. It is preferred that the Shiga toxin effector polypeptide maintain the polypeptide region from amino acid position 77 to 239 (SLT-1A (SEQ ID NO:1) or StxA (SEQ ID NO:2)) or the equivalent in other A Subunits of members of the Shiga toxin family (e.g. 77 to 238 of (SEQ ID NO:3)). For example, in certain embodiments of the invention, a Shiga toxin effector polypeptide region derived from SLT-1A may comprise or consist essentially of amino acids 75 to 251 of SEQ ID NO:1, 1 to 241 of SEQ ID NO:1, 1 to 251 of SEQ ID NO:1, or amino acids 1 to 261 of SEQ ID NO:1. Among certain other embodiments, a Shiga toxin effector region derived from StxA may comprise or consist essentially of amino acids 75 to 251 of SEQ ID NO:2, 1 to 241 of SEQ ID NO:2, 1 to 251 of SEQ ID NO:2, or amino acids 1 to 261 of SEQ ID NO:2. Among certain other embodiments, a Shiga toxin effector region derived from SLT-2 may comprise or consist essentially of amino acids 75 to 251 of SEQ ID NO:3, 1 to 241 of SEQ ID NO:3, 1 to 251 of SEQ ID NO:3, or amino acids 1 to 261 of SEQ ID NO:3.

[0168] In certain embodiments of the multivalent CD20-binding molecules of the present invention, the Shiga toxin effector polypeptide differs from a naturally occurring Shiga toxin A Subunit by up to 1, 2, 3, 4, 5, 6, 7, 8, 9, 10, 15, 20, 25, 30, 35, 40 or more amino acid residues (but by no more than that which retains at least 85%, 90%, 95%, 99%, or more amino acid sequence identity).

[0169] In certain embodiments, the multivalent CD20-binding molecule of the present invention comprises a toxin effector region derived from a proteinaceous toxin other than a Shiga toxin(s). In certain embodiments, the multivalent CD20-binding molecule of the present invention comprises a nonfunctional Shiga toxin effector region. In certain embodiments, the multivalent CD20-binding molecule of the present invention does not comprise a Shiga toxin effector region. In certain embodiments, the multivalent CD20-binding molecule of the present invention comprises a toxin effector region, whether catalytically active or inactive, derived from a toxin(s) other than a member of the Shiga toxin family, such as, e.g., from an ABx toxin other than Shiga toxin, a ribosome inactivating protein toxin other than Shiga toxin, abrin, anthrax toxin, Aspf1, bouganin, bryodin, cholix toxin, claudin, diphtheria toxin, gelonin, heat-labile enterotoxin, mitogillin, pertussis toxin, pokeweed antiviral protein, pulchellin, Pseudomonas exotoxin A, restrictocin, ricin, saporin, sarcin, and subtilase cytotoxin (see e.g., WO 2015/113005; WO 2015/120058). In certain embodiments, the multivalent CD20-binding molecule of the present invention does not comprise either a toxin effector region or any polypeptide derived from a toxin.

[0170] In the above embodiments of multivalent CD20-binding molecules of the present invention, the CD20 binding regions and toxin effector polypeptide region(s) (which may be cytotoxic and/or harbor one or more mutations altering, reducing, or eliminating catalytic activity and/or cytotoxicity) may be directly linked to each other and/or suitably linked to each other via one or more linkers well known in the art and/or described herein, such as, e.g., proteinaceous linkers capable of being genetically fused between other proteinaceous components of the multivalent CD20-binding molecules of the present invention.

[0171] Optionally, a multivalent CD20-binding molecule of the present invention may further comprise a carboxy-terminal endoplasmic retention/retrieval signal motif, such as, e.g., the amino acids KDEL (SEQ ID NO:305) at the carboxy-terminus of a proteinaceous component (e.g. a protein component) of the multivalent CD20-binding molecule.

### C. Linkages Connecting Components of the Multivalent CD20-Binding Molecules of the Present Invention

[0172] Individual peptide, polypeptide and/or protein components of the multivalent CD20-binding molecules of the present invention, e.g., CD20 binding regions and Shiga toxin effector polypeptides, may be suitably linked to each other via one or more linkers well known in the art and/or described herein. Protein and polypeptide components of the multivalent CD20-binding molecules of the present invention, e.g., multi-chain binding regions, may be suitably linked to each other or other polypeptide components of the multivalent CD20-binding molecules of the invention via one or more linkers well known in the art. Peptide components of the multivalent CD20-binding molecules of the present invention, e.g., antigenic peptides and KDEL family endoplasmic reticulum retention/retrieval signal motifs, may be suitably linked to another component of the invention via one or more linkers, such as a proteinaceous linker, which are well known in the art.

[0173] Suitable linkers are generally those which allow each polypeptide component of the multivalent CD20-binding molecule of the present invention to fold with a three-dimensional structure very similar to the polypeptide components produced individually without any linker or other component. Suitable linkers include single amino acids, peptides, polypeptides, and linkers lacking any of the aforementioned, such as various non-proteinaceous carbon chains, whether branched or cyclic (see e.g. Alley S et al., Bioconjug Chem 19: 759-65 (2008); Ducry L, Stump B, Bioconjug Chem 21: 5-13 (2010)).

[0174] Suitable linkers may be proteinaceous and comprise one or more amino acids, peptides, and/or polypeptides. Proteinaceous linkers are suitable for both recombinant fusion proteins and chemically linked conjugates. A proteinaceous linker typically has from about 2 to about 50 amino acid residues, such as, e.g., from about 5 to about 30 or from about 6 to about 25 amino acid residues. The length of the linker selected will depend upon a variety of factors, such as, e.g., the desired property or properties for which the linker is being selected.

[0175] Suitable linkers may be non-proteinaceous, such as, e.g. chemical linkers. Various non-proteinaceous linkers known in the art may be used to link CD20 binding regions to a Shiga toxin effector polypeptide(s), such as linkers commonly used to conjugate immunoglobulin polypeptides to heterologous polypeptides. For example, components of the multivalent CD20-binding molecules of the present invention may be linked together using the functional side chains of their amino acid residues and carbohydrate moieties such as, e.g., a carboxy, amine, sulfhydryl, carboxylic acid, carbonyl, hydroxyl, and/or cyclic ring group. For example, disulfide bonds and thioether bonds may be used to link two or more proteins. In addition, non-natural amino acid residues may be used with other functional side chains, such as ketone groups (see e.g. Axup J et al., Proc Natl Acad Sci USA 109: 16101-6 (2012)). Examples of non-proteinaceous chemical linkers include but are not limited to N-succinimidyl (4-iodoacetyl)-aminobenzoate, S-(N-succinimidyl) thioacetate (SATA), N-succinimidyl-oxycarbonyl-cu-methyl-a-(2-pyridyldithio) toluene (SMPT), N-succinimidyl 4-(2-pyridyldithio)-pentanoate (SPP), succinimidyl 4-(N-maleimidomethyl) cyclohexane carboxylate (SMCC or MCC), sulfosuccinimidyl (4-iodoacetyl)-aminobenzoate, 4-succinimidyl-oxycarbonyl-α-(2-pyridyldithio) toluene, sulfosuccinimidyl-6-(α-methyl-α-(pyridyldithiol)-toluamido) hexanoate, N-succinimidyl-3-(-2-pyridyldithio)-proprionate (SPDP), succinimidyl 6(3(-(-2-pyridyldithio)-proprionamido) hexanoate, sulfosuccinimidyl 6(3(-(-2-pyridyldithio)-propionamido) hexanoate, maleimidocaproyl (MC), maleimidocaproyl-valine-citrulline-p-aminobenzyloxycarbonyl (MC-vc-PAB), 3-maleimidobenzoic acid N-hydroxysuccinimide ester (MBS), alpha-alkyl derivatives, sulfoNHS-ATMBA (sulfosuccinimidyl N-[3-(acetylthio)-3-methylbutyryl-beta-alanine]), sulfodicholorphenol, 2-iminothiolane, 3-(2-pyridyldithio)-propionyl hydrazide, Ellman's reagent, dichlorotriazinic acid, and S-(2-thiopyridyl)-L-cysteine.

[0176] Suitable linkers, whether proteinaceous or non-proteinaceous, may include, e.g., protease sensitive, environmental redox potential sensitive, pH sensitive, acid cleavable, photocleavable, and/or heat sensitive linkers (see e.g., Zarling D et al., J Immunol 124: 913-20 (1980); Jung S, Moroi M, Biochem Biophys Acta 761: 152-62 (1983); Bouizar Z et al., Eur J Biochem 155: 141-7 (1986); Park L et al., J Biol Chem 261: 205-10 (1986); Browning J, Ribolini A, J Immunol 143: 1859-67 (1989); Joshi S, Burrows R, J Biol Chem 265: 14518-25 (1990); Doronina S et al., Bioconjug Chem 17: 114-24 (2003); Saito G et al., Adv Drug Deliv Rev 55: 199-215 (2003); Jeffrey S et al., J Med Chem 48: 1344-58 (2005); Sanderson R et al., Clin Cancer Res 11: 843-52 (2005); Erickson H et al., Cancer Res 66: 4426-33 (2006); Chen X et al., Adv Drug Deliv Rev 65: 1357-69 (2013)).

[0177] Proteinaceous linkers may be chosen for incorporation into embodiments of the multivalent CD20-binding molecules of the present invention which are recombinant, fusion proteins. For example, the proteinaceous components of a multivalent CD20-binding protein of the present invention may be joined by one or more linkers comprising one or more amino acids, peptides, and/or polypeptides. For recombinant, fusion, multivalent CD20-binding proteins of the present invention, linkers typically comprise about 1 to 50 amino acid residues, preferably about 5 to 30 amino acid residues. Commonly, proteinaceous linkers comprise a majority of amino acid residues with polar, uncharged, and/or charged residues, such as, e.g., threonine, proline, glutamine, glycine, and alanine. Non-limiting examples of proteinaceous linkers include alanine-serine-glycine-glycine-proline-glutamate (ASGGPE) (SEQ ID NO:353), valine-methionine (VM), alanine-methionine (AM), AM(G_{2 to 4}S)ₓAM (SEQ ID NO:354) where G is glycine, S is serine, and x is an integer from 1 to 10.

[0178] Proteinaceous linkers may be selected based upon the properties desired. Proteinaceous linkers may be chosen by the skilled worker with specific features in mind, such as to optimize one or more of the fusion protein's folding, stability, expression, solubility, pharmacokinetic properties, pharmacodynamic properties, and/or the activity of the fused domains in the context of a fusion construct as compared to the activity of the same domain by itself. For example, proteinaceous linkers may be selected based on flexibility, rigidity, and/or cleavability. The skilled worker may use databases and linker design software tools when choosing linkers. Certain linkers may be chosen to optimize expression. Certain linkers may be chosen to promote intermolecular interactions between identical CD20-binding molecules to form homomultimers or different CD20-binding molecules to form heteromultimers (see e.g. FIG. 1B). For example, proteinaceous linkers may be selected which allow for desired non-covalent interactions between proteinaceous components of the multivalent CD20-binding molecules of the present invention, such as, e.g., interactions related to the formation of dimers and other higher order multimers (see e.g. FIG. 1B).

[0179] Flexible proteinaceous linkers are often greater than twelve amino acid residues long and rich in small, non-polar amino acid residues; polar amino acid residues; and/or hydrophilic amino acid residues, such as, e.g., glycines, serines, and threonines. Flexible proteinaceous linkers may be chosen to increase the spatial separation between components and/or to allow for intramolecular interactions between components. For example, various “GS” linkers are known to the skilled worker and are composed of multiple glycines and/or one or more serines, sometimes in repeating units, such as, e.g., (GₓS)ₙ (SEQ ID NO:355), (SₓG)ₙ (SEQ ID NO:356), (GGGGS)ₙ (SEQ ID NO:357), and (G)ₙ (SEQ ID NO:358), in which x is 1 to 6 and n is 1 to 30 (see e.g. WO 96/06641). Non-limiting examples of flexible proteinaceous linkers include GKSSGSGSESKS (SEQ ID NO:359), EGKSSGSGSESKEF (SEQ ID NO:360), GSTSGSGKSSEGKG (SEQ ID NO:361), GSTSGSGKSSEGSGSTKG (SEQ ID NO:362), GSTSGSGKPGSGEGSTKG (SEQ ID NO:363), SRSSG (SEQ ID NO:364), and SGSSC (SEQ ID NO:365).

[0180] Rigid proteinaceous linkers are often stiff alpha-helical structures and rich in proline residues and/or one or more strategically placed prolines. Rigid linkers may be chosen to prevent intramolecular interactions between linked components.

[0181] Suitable linkers may be chosen to allow for in vivo separation of components, such as, e.g., due to cleavage and/or environment-specific instability. In vivo cleavable proteinaceous linkers are capable of unlinking by proteolytic processing and/or reducing environments often at a specific site within an organism or inside a certain cell type. In vivo cleavable proteinaceous linkers often comprise protease sensitive motifs and/or disulfide bonds formed by one or more cysteine pairs. In vivo cleavable proteinaceous linkers may be designed to be sensitive to proteases that exist only at certain locations in an organism, compartments within a cell, and/or become active only under certain physiological or pathological conditions (such as, e.g., involving proteases with abnormally high levels, proteases overexpressed at certain disease sites, and proteases specifically expressed by a pathogenic microorganism). For example, there are proteinaceous linkers known in the art which are cleaved by proteases present only intracellularly, proteases present only within specific cell types, and proteases present only under pathological conditions like cancer or inflammation, such as, e.g., R-x-x-R motif and AMGRSGGGCAGNRVGSSLSCGGLNLQAM (SEQ ID NO:366).

[0182] In certain embodiments of the multivalent CD20-binding molecules of the present invention, a linker may be used which comprises one or more protease sensitive sites to provide for cleavage by a protease present within a target cell. In certain embodiments of the multivalent CD20-binding molecules of the present invention, a linker may be used which is not cleavable to reduce unwanted toxicity after administration to a vertebrate organism.

[0183] Suitable linkers may include, e.g., protease sensitive, environmental redox potential sensitive, pH sensitive, acid cleavable, photocleavable, and/or heat sensitive linkers, whether proteinaceous or non-proteinaceous.

[0184] Suitable cleavable linkers may include linkers comprising cleavable groups which are known in the art such as, e.g., linkers noted by Zarling D et al., J Immunol 124: 913-20 (1980); Jung S, Moroi M, Biochem Biophys Acta 761: 152-62 (1983); Bouizar Z et al., Eur J Biochem 155: 141-7 (1986); Park L et al., J Biol Chem 261: 205-10 (1986); Browning J, Ribolini A, J Immunol 143: 1859-67 (1989); Joshi S, Burrows R, J Biol Chem 265: 14518-25 (1990).

[0185] Suitable linkers may include pH sensitive linkers. For example, certain suitable linkers may be chosen for their instability in lower pH environments to provide for dissociation inside a subcellular compartment of a target cell (see e.g. van Der Velden V et al., Blood 97: 3197-204 (2001); Ulbrich K, Subr V, Adv Drug Deliv Rev 56: 1023-50 (2004)). For example, linkers that comprise one or more trityl groups, derivatized trityl groups, bismaleimideothoxy propane groups, adipic acid dihydrazide groups, and/or acid labile transferrin groups, may provide for release of components of the multivalent CD20-binding molecules of the present invention, e.g. a polypeptide component, in environments with specific pH ranges (see e.g. Welhöner H et al., J Biol Chem 266: 4309-14 (1991); Fattom A et al., Infect Immun 60: 584-9 (1992)). Certain linkers may be chosen which are cleaved in pH ranges corresponding to physiological pH differences between tissues, such as, e.g., the pH of tumor tissue is lower than in healthy tissues (see e.g. U.S. Pat. No. 5,612,474).

[0186] Photocleavable linkers are linkers that are cleaved upon exposure to electromagnetic radiation of certain wavelength ranges, such as light in the visible range. Photocleavable linkers may be used to release a component of a multivalent CD20-binding molecule of the present invention, e.g. a polypeptide component, upon exposure to light of certain wavelengths. Non-limiting examples of photocleavable linkers include a nitrobenzyl group as a photocleavable protective group for cysteine, nitrobenzyloxycarbonyl chloride cross-linkers, hydroxypropylmethacrylamide copolymer, glycine copolymer, fluorescein copolymer, and methylrhodamine copolymer. Photocleavable linkers may have particular uses in linking components to form multivalent CD20-binding molecules of the invention designed for treating diseases, disorders, and conditions that can be exposed to light using fiber optics.

[0187] In certain embodiments of the multivalent CD20-binding molecules of the present invention, a CD20 binding region is linked to a Shiga toxin effector polypeptide using any number of means known to the skilled worker, including either or both covalent and noncovalent linkages. Individual, polypeptide subcomponents of the CD20 binding regions, e.g. an immunoglobulin CDR, ABR, heavy chain variable region (V_{H}), light chain variable region (V_{L}), and/or V_{H}H region, may be suitably linked to each other via one or more linkers well known in the art and/or described herein.

[0188] In certain embodiments of the multivalent CD20-binding molecules of the present invention, the molecule comprises a CD20 binding region which is a scFv with a linker connecting a heavy chain variable (V_{H}) domain and a light chain variable (V_{L}) domain. There are numerous linkers known in the art suitable for this purpose, such as, e.g., the 15-residue (Gly4Ser)₃ peptide (SEQ ID NO:367). Suitable scFv linkers which may be used in forming non-covalent multivalent structures include GGS, GGGS (Gly3Ser or G3S) (SEQ ID NO:368), GGGGS (Gly4Ser or G4S) (SEQ ID NO:45), GGGGSGGG (SEQ ID NO:369), GGSGGGG (SEQ ID NO:370), GSTSGGGSGGGSGGGGSS (SEQ ID NO:371), and GSTSGSGKPGSSEGSTKG (SEQ ID NO:372).

[0189] Suitable methods for linking components of the multivalent CD20-binding molecules of the present invention may be by any method presently known in the art for accomplishing such, as long as the attachment does not substantially impede the binding capability of the CD20 binding regions, the cellular internalization of the multivalent CD20-binding molecule, and/or desired, Shiga toxin effector function(s) of the Shiga toxin effector region as measured by an appropriate assay, including by assays described herein.

### D. Structural Examples of Multivalent CD20-Binding Molecules

[0190] The general structure of the multivalent CD20-binding molecules of the present invention is modular, in that various, diverse CD20 binding regions may be used with the same or different Shiga toxin effector polypeptide regions to provide for cell-targeting of cytotoxicity, cytostasis, diagnostic agents, and/or exogenous material delivery to various diverse CD20-expressing cell types. It will be appreciated by the skilled worker that any two or more CD20 binding regions, each capable of binding an extracellular part of CD20, may be associated with a Shiga toxin effector polypeptide(s) to produce multivalent CD20-binding molecules of the present invention.

[0191] In certain embodiments, the multivalent CD20-binding molecules of the present invention comprise 2, 3, 4, 5, 6, 7, 8, 9, 10, 11, 12, 13, 14, 15, 16, 17, 18, 19, 20, or 22 individual CD20 binding regions.

[0192] The multivalent CD20-binding molecules of the invention may comprise various multivalent structures (see e.g. FIG. 1A and FIG. 1B). For example, multivalent structures can be created using covalent and/or non-covalent interactions to associate together various components to form a multivalent CD20-binding molecule of the present invention. In certain embodiments, the multivalent CD20-binding molecules of the present invention are multimeric complexes of two or more proteinaceous subunits, such as, e.g. dimers, trimers, tetramers, diabodies, triabodies, tetrabodies, etc.

[0193] In certain embodiments, the multivalent CD20-binding molecule of the present invention comprises two or more CD20 binding regions because two or more components of the multivalent CD20-binding molecule are chemically linked or conjugated together. For example, chemical linkers may be used to conjugate two or more CD20-binding proteins together to form a multivalent CD20-binding molecule (see e.g. Wolff E et al., Cancer Res 53: 2560-5 (1993); Ghetie Metal., Proc Natl Acad Sci USA 94: 7509-14 (1997); Ghetie M et al., Blood 97: 1392-8 (2001)).

[0194] Certain embodiments of the multivalent CD20-binding molecules of the present invention comprise a multimeric structure comprising two or more component molecules, which may be identical or non-identical. As used herein, the nomenclature (X)ₙ refers to a molecule comprising or consisting of integer number (n) copies of a component (X). For example, a dimeric protein comprising two identical, monovalent, CD20-binding polypeptide subunits may be referred to as a homodimer or (CD20-binding monomer)₂. Another example is a mixture of multivalent proteins, each protein comprising three or more identical polypeptide “X” subunits, which is referred to herein as (X)₂₊ₙ, where “n” refers to a positive integer and the value of “2+n” representing the number of CD20 binding regions per protein of the protein molecules present, thus describing a plurality of different multivalent protein species present in a single protein composition.

[0195] Certain embodiments of the multivalent CD20-binding molecules of the present invention are multimeric, being comprised of two or more CD20-binding molecules, such as, e.g., homodimers, homotrimers, and homotetramers, and the like. For example, two or more monovalent CD20-binding polypeptides may be combined to form multivalent CD20-binding molecules of the present invention (see e.g. FIG. 1A and FIG. 1B).

[0196] In certain embodiments, the multivalent CD20-binding molecule of the present invention comprises two or more components, each comprising at least one CD20 binding region, because of a non-covalent intermolecular association(s) resulting from domain swapping between the two or more components which results in a multivalent CD20-binding molecule with a multimeric structure (see e.g. FIG. 1B). For example, protein domain swapping between immunoglobulin domains can be engineered and optimized as a mechanism of producing precise multimeric structures (see e.g. Arndt K et al., Biochemistry 37: 12918-26 (1998); Holliger P et al., Proc Natl Acad Sci USA 90: 6444-8 (1993).

[0197] The skilled worker can engineer multimeric, multivalent CD20-binding molecules of the present invention using various scFv-based polypeptide interactions, such as, e.g. scFv-based dimeric, trimeric, tetrameric complexes, etc. For example, the length of the linker in the scFv can affect the spontaneous assembly of non-covalent based, multimeric, multivalent structures. Generally, linkers of twelve amino acids or less, including the absence of any linker, promote the multimerization of polypeptides or proteins comprising scFvs into higher molecular weight species via favoring intermolecular domain swapping over intra-chain domain pairing (see e.g., Huston J et al., Methods Enzymol 203: 46-88 (1991); Holliger P et al., Proc Natl Acad Sci USA 90: 6444-8 (1993); Stemmer W et al., Biotechniques 14: 256-65 (1993); Whitlow M et al., Protein Eng 6: 989-95 (1993); Desplancq D et al., Protein Eng 7: 1027-33 (1994); Whitlow M et al., Protein Eng 7: 1017-26 (1994); Alfthan K et al., Protein Eng 8: 725-31 (1995); Iliades P et al., FEBS Lett 409: 437-41 (1997); Kortt A et al., Biomol Eng 18: 95-108 (2001); Todorovska A et al., J Immunol Methods 248: 47-66 (2001); Tomlinson I, Holliger P et al., Methods Enzymol 326: 461-79 (2001); Dolezal O et al., Protein Eng 16: 47-56 (2003)). However, scFvs with no linker at all or a linker with an exemplary length of 15 amino acid residues may multimerize (Whitlow M et al., Protein Eng 6: 989-95 (1993); Desplancq D et al., Protein Eng 7: 1027-33 (1994); Whitlow M et al., Protein Eng 7, 1017-26 (1994); Alfthan K et al., Protein Eng 8: 725-31 (1995)). The skilled worker can identify the multimeric structure(s) created and/or purified using techniques known in the art and/or described herein.

[0198] In addition, engineered structures with additional covalent bonds can be used to stabilize multimeric structures that spontaneously assemble (see e.g. Glockshuber R et al., Biochemistry 29: 1362-7 (1990)). For example, the introduction of cysteine residues at specific locations may be used to create disulfide stabilized structures like Cys-diabodies, scFv′ multimers, V_{H}H multimers, V_{NAR} multimers, and IgNAR multimers such as, e.g., by adding the following amino acid residues: GGGGC (SEQ ID NO:373) and SGGGGC (SEQ ID NO:374) (Tai M et al., Biochemistry 29: 8024-30 (1990); Caron P et al., J Exp Med 176: 1191-5 (1992); Shopes B, J Immunol 148: 2918-22 (1992); Adams G et al., Cancer Res 53: 4026-34 (1993); McCartney J et al., Protein Eng 18: 301-14 (1994); Perisic O et al., Structure 2: 1217-26 (1994); George A et al., Proc Natl Acad Sci USA 92: 8358-62 (1995); Tai M et al., Cancer Res (Suppl) 55: 5983-9 (1995); Olafsen T et al., Protein Eng Des Sel 17: 21-7 (2004)). Thus, the skilled worker can create or stabilize multivalent CD20-binding molecules of the present invention using disulfide bridge(s) and/or by adding or removing cysteine residue(s) at certain positions to control the position(s) of certain disulfide bridges.

[0199] In certain embodiments, the multivalent structure of a CD20-binding molecule of the present invention comprises two or more immunoglobulin domains that binding an extracellular part of CD20. In certain embodiments, the multivalent CD20-binding molecule of the present invention may comprise or consist of a single, continuous, polypeptide chain. For example, single-chain bivalent scFvs, sometimes referred to as tandem scFvs (taFvs), single chain diabodies (scDbs), and tandem diabodies (tanDbs or Tandabs), represent multivalent binding proteins which are created from a single continuous polypeptide (see e.g. Mack M et al., Proc Natl Acad Sci USA 92: 7021-5 (1995); Kipriyanov S et al., J Mol Biol 293: 41-56 (1999); Cochlovius, B et al., Cancer Res 60: 4336-41 (2000); Volkel T et al., Protein Eng 14: 815-23 (2001); Jendreyko N et al., J Biol Chem 278: 47812-9 (2003); Kipriyanov S et al., J Mol Biol 330: 99-111 (2003); Miller K et al., J Immunol 170: 4854-61 (2003); Meng R et al., Clin Cancer Res 10: 1274-81 (2004); Schlereth B et al., Cancer Res 65: 2882-9 (2005); Huang T, Morrison S, J Pharmacol Exp Ther 316: 983-91 (2006); Liu X et al., Int Immunopharmacol 6: 791-9 (2006); Shen J et al., J Biol Chem 281: 10706-14 (2006); Shen J et al., J Immunol Methods 318: 65-74 (2007); Wu C et al., Nat Biotech 25: 1290-7 (2007); Li B et al., Cancer Res 68: 2400-8 (2008)).

[0200] In certain embodiments, the multivalent CD20-binding molecule of the present invention comprises both a linker(s) between two or more CD20 binding regions as well as one or more disulfide bonds between components of the CD20 binding regions, whether proximal or distal to the linker, such as a disulfide bond between two immunoglobulin regions which requires an immunoglobulin domain swapping association between those two immunoglobulin regions (see e.g. Glockshuber R et al., Biochemistry. 29: 1362-7 (1990)).

[0201] Alternatively, two or more polypeptide chains may be linked together using polypeptide domains which self-associate or multimerize with each other (see e.g. U.S. Pat. No. 6,329,507). For example, the addition of carboxy-terminal multimerization domains has been used to construct multivalent proteins comprising immunoglobulin domains, such as, e.g., scFvs, autonomous V_{H} domains, V_{H}Hs, V_{NAR}s, and IgNARs. Examples of self-associating domains known to the skilled worker include immunoglobulin constant domains (such as knobs-into-holes, electrostatic steering, and IgG/IgA strand exchange), immunoglobulin Fab chains (e.g. (Fab-scFv)₂ and (Fab′ scFv)₂), immunoglobulin Fc domains (e.g. (scDiabody-Fc)₂, (scFv-Fc)₂ and scFv-Fc-scFv), immunoglobulin CHX domains, immunoglobulin CH1-3 regions, immunoglobulin CH3 domains (e.g. (scDiabody-CH3)₂, LD minibody, and Flex-minibody), immunoglobulin CH4 domains, CHCL domains, amphiphilic helix bundles (e.g. scFv-HLX), helix-turn-helix domains (e.g. scFv-dHlx), coiled-coil structures including leucine zippers and cartilage oligometric matrix proteins (e.g. scZIP), cAMP-dependent protein kinase (PKA) dimerization and docking domains (DDDs) combined with an A kinase anchor protein (AKAP) anchoring domain (AD) (also referred to as “dock-and-lock” or “DNL”), streptavidin, verotoxin B multimerization domains, tetramerization regions from p53, and barnase-barstar interaction domains (Pack P, Plückthun A, Biochemistry 31: 1579-84 (1992); Holliger P et al., Proc Natl Acad Sci USA 90: 6444-8 (1993); Kipriyanov S et al., Hum Antibodies Hybridomas 6: 93-101 (1995); de Kruif J, Logtenberg T, J Biol Chem 271: 7630-4 (1996); Hu S et al., Cancer Res 56: 3055-61 (1996): Kipriyanov S et al., Protein Eng 9: 203-11 (1996); Rheinnecker M et al., J Immunol 157: 2989-97 (1996); Tershkikh A et al., Proc Natl Acad Sci USA 94: 1663-8 (1997); Müller K et al., FEBS Lett 422: 259-64 (1998); Cloutier S et al., Mol Immunol 37: 1067-77 (2000); Li S et al., Cancer Immunol Immunother 49: 243-52 (2000); Schmiedl A et al., Protein Eng 13: 725-34 (2000); Schoonjans R et al., J Immunol 165: 7050-7 (2000); Borsi L et al., Int J Cancer 102: 75-85 (2002); Deyev S et al., Nat Biotechnol 21: 1486-92 (2003); Wong W, Scott J, Nat Rev Mol Cell Biol 5: 959-70 (2004); Zhang J et al., J Mol Biol 335: 49-56 (2004); Baillie G et al., FEBS Letters 579: 3264-70 (2005); Rossi E et al., Proc Natl Acad Sci USA 103: 6841-6 (2006); Simmons D et al., J Immunol Methods 315: 171-84 (2006); Braren I et al., Biotechnol Appl Biochem 47: 205-14 (2007); Chang C et al., Clin Cancer Res 13: 5586-91s (2007); Liu M et al., Biochem J 406: 237-46 (2007); Zhang J et al., Protein Expr Purif 65: 77-82 (2009); Bell A et al., Cancer Lett 289: 81-90 (2010); Iqbal U et al., Br J Pharmacol 160: 1016-28 (2010); Asano R et al., FEBS J 280: 4816-26((2013); Gil D, Schrum A, Adv Biosci Biotechnol 4: 73-84 (2013)).

[0202] In certain embodiments, the structure of a multivalent CD20-binding molecule of the present invention is engineered from an antibody or Fab fragment. For example, multivalent CD20-binding molecules may be engineered using approaches known to the skilled worker (see e.g. Shuford W et al., Science 252: 724-7 (1991); Caron P et al., J Exp Med 176: 1191-5 (1992); Shopes B, J Immunol 148: 2918-22 (1992); Wolff E et al., Cancer Res 53: 2560-5 (1993)).

[0203] In certain embodiments of the multivalent CD20-binding molecules of the present invention, all the cell-targeting binding regions of the multivalent CD20-binding molecules are identical and/or share the same binding specificities. In such embodiments, the multivalent CD20-binding molecule of the invention is monospecific—meaning it comprises CD20 binding regions that bind with high affinity to the same extracellular CD20 target biomolecule, overlapping extracellular epitopes in the same CD20 target biomolecule, and/or the same extracellular epitope in a CD20 target biomolecule. Whether two binding regions are binding to the same extracellular part of a CD20 target biomolecule may be determined by the skilled worker with available methods, such as, e.g., empirically using competitive binding assays or predictively based on the overlap of known epitope and/or immunized peptide sequences.

[0204] In certain embodiments, the multivalent CD20-binding molecule of the present invention may comprise binding regions that bind with high affinity to non-identical epitopes, whether non-overlapping or overlapping. The multivalent CD20-binding molecules of the present invention may comprise binding regions with high binding affinity to non-overlapping epitopes. Multispecific, multivalent CD20-binding molecules of the present invention may be created using two or more different binding regions, such as, e.g., two different scFvs, V_{H}Hs, V_{NAR}s, and/or IgNARs in diabodies, triabodies, tandem formats (including tandem di-scFv, tandem tri-scFv, and scFv-Fc tandems), single-chain diabodies (scDb), tandem Fvs, bispecific scFv (Bis-scFv), scFv2, (Fab′)₃, tetrameric (scFv2)₂, scFv2-Fc, and combinations of scFvs, V_{H}Hs, V_{NAR}s, and/or IgNARs with different specificities (Adams G et al., Cancer Res 53: 4026-34 (1993); Mallender W et al., J Biol Chem 269: 199-206 (1994); Todorovska A et al., J Immunol Methods 248: 4′7-66 (2001); Korn T et al., J Gene Med 6: 642-51 (2004), Lu D et al., J Biol Chem 280: 19665-72 (2005); Schneider M et al., Eur J Immunol 35: 987-95 (2005); Wittel U et al., Nucl Med Biol 32: 157-64 (2005); Semenyuk E et al., Biochimie 89:31-8 (2007)).

[0205] In certain embodiments, the multivalent CD20-binding molecule of the present invention may comprise a single, continuous polypeptide component which is multimerized with itself or another protein to form a multimeric structure. For example, single-chain bivalent scFvs, sometimes referred to as tandem scFvs (taFvs), single chain diabodies (scDbs), and tandem diabodies (tanDbs or Tandabs), can be expressed as single continuous polypeptide chain (Mack M et al., Proc Natl Acad Sci USA 92: 7021-5 (1995); Kipriyanov S et al., J Mol Biol 293: 41-56 (1999); Cochlovius, B et al., Cancer Res 60: 4336-41 (2000); Volkel T et al., Protein Eng 14: 815-23 (2001); Kipriyanov S et al., J Mol Biol 330: 99-111 (2003); Schlereth B et al., Cancer Res 65: 2882-9 (2005)). These multivalent structures may be engineered to multimerize into higher-order, higher-valence structures, such as, e.g. a tetravalent F(ab′)₂, (taFv)₂, and (scDb)₂ structures (see Todorovska A et al., J Immunol Methods 248: 47-66 (2001)).

[0206] Structures comprising two scFvs linked by non-covalent interactions due to the intermolecular pairing of variable regions are known to the skilled worker, such as, e.g., diabodies, mini-antibodies, and bivalent mini-antibodies, all of which may be either monospecific or bispecific (Holliger, P et al., Proc Natl Acad Sci USA 90: 6444-8 (1993); Pack P et al., Biotechnology (NY) 11: 1217-7 (1993); Tai Metal., Cancer Res (Suppl) 55: 5983-9 (1995); Atwell J et al., Mol Immunol 33: 1301-12 (1996); Rheinnecker M et al., J Immunol 157: 2989-97 (1996); Schier R et al., J Mol Biol 255: 28-43 (1996); Adams G et al., Br J Cancer 77: 1405-12 (1998); Todorovska A et al., J Immunol Methods 248: 47-66 (2001); Bühler P et al., Cancer Immunol Immunother 57: 43-52 (2008)). Numerous scFv monomers have been observed to naturally form multimers or oligomers (e.g. diabodies, triabodies, and tetrabodies) due to self-association, with the majority form being dimeric for scFv structures comprising linkers of 3-12 amino acid residues (Essig N et al., J Mol Biol 234: 897-901 (1993); Griffiths A et al., EMBO J 12: 725-34 (1993); Holliger P et al., Proc Natl Acad Sci USA 90: 6444-8 (1993); Whitlow M et al., Protein Eng 6: 989-95 (1993); Desplancq D et al., Protein Eng 7: 1027-33 (1994); Whitlow M et al., Protein Eng 7, 1017-26 (1994); Kortt A et al., Protein Eng 10: 423-33 (1997); Arndt K et al., Biochemistry 37: 12918-26 (1998); Atwell J et al., Protein Eng 12: 597-604 (1999)).

[0207] In general, scFv structures with a relatively short linker of five to ten amino acid residues or less have a greater propensity for homo-dimerization (Arndt K et al., Biochemistry 37: 12918-26 (1988); Holliger P et al., Proc Natl Acad Sci USA 90: 6444-8 (1993); Perisic O et al., Structure 2: 1217-26 (1994); Atwell J et al., Mol Immunol 33: 1301-12 (1996); Iliades P et al., FEBS Lett 409: 437-41 (1997); Kortt A et al., Protein Eng 10: 423-33 (1997); Metzger D et al., Protein Eng 10: 423-33 (1997); Pei X et al., Proc Natl Acad Sci USA 94: 9637-42 (1997); Atwell J et al., Protein Eng 12: 597-604 (1999); Denton G et al., Cancer Immunol Immunother 48: 29-38 (1999); Le Gall F et al., FEBS Lett 453: 164-8 (1999); Atwell J et al., Protein Eng 12: 597-604 (1999); Dolezal, O et al., Protein Eng 13: 565-74 (2000); Nielsen U et al., Cancer Res 60: 6434-40 (2000); Todorovska A et al., J Immunol Methods 248: 47-66 (2001); Wu A et al., Protein Eng 14: 1025-33 (2001); Arndt M et al., FEBS Lett 578: 257-61 (2004); Le Gall F et al., J Immunol Methods 285: 111-27 (2004)). In contrast, scFvs with linkers comprising at least 12 amino acid residues predominantly form monomers with only a minority fraction undergoing spontaneous multimerization (Nielsen U et al., Cancer Res 60: 6434-40 (2000); Denton G et al., Cancer Immunol Immunother 48: 29-38 (1999); Kortt A et al., Biomol Eng 18: 95-108 (2001); Völkel T et al., Protein Eng 14: 815-23 (2001)).

[0208] The use of linkers of three amino acid residues or fewer may promote multimerization to higher order structures larger than dimeric forms. If an scFv has a linker of less than 3 residues, then trimerization may be favored (Iliades P et al., FEBS Lett 409: 437-41 (1997)); Kortt A et al., Biomol Eng 18: 95-108 (2001); Todorovska A et al., J Immunol Methods 248: 47-66 (2001); Arndt Metal., FEBS Lett 578: 257-61 (2004)). Furthermore, scFvs with very short linkers, e.g., linkers of 2 amino acid residues or less, often form trimers and/or mixtures of trimers and tetramers (Pei X et al., Proc Natl Acad Sci USA 94: 9637-42 (1997); Hudson P, Kortt A, J Immunol Methods 231: 177-89 (1999); Dolezal O et al., Protein Eng 13: 565-74 (2000); Power B et al., Protein Sci 12: 734-47 (2003); Le Gall F et al., J Immunol Methods 285: 111-27 (2004)). In certain arrangements with short linkers, tetramers may be favored (Dolezal O et al., Protein Eng 13: 565-74 (2003); Arndt M et al., FEBS Lett 578: 257-61 (2004)). Multimeric structures can be formed by scFvs lacking any linker, i.e. having a linker length of zero amino acid residues. For example, the direct linkage of variable domains with V_{L} before V_{H} may favor the formation of tetrabodies (Iliades P et al., FEBS Lett 409: 437-41 (1997)) whereas V_{H} before V_{L} may favor trimers (Kortt A et al., Protein Eng 10: 423-33 (1997)).

[0209] In addition to the linker length, the orientation of the variable domains may affect multimerization characteristics (Huston J et al., Proc Natl Acad Sci USA 85, 5879-83 (1988); Padlan E, Mol Immunol 31: 169-217 (1994); Kortt A et al., Protein Eng 10: 423-33 (1997); Dolezal, O et al., Protein Eng 13: 565-74 (2000); Carmichael J et al., J Mol Biol 326: 341-51 (2003); Arndt M et al., FEBS Lett 578: 257-61 (2004)). It has been suggested that the V_{L}-V_{H} orientation exhibits a greater tendency to form higher molecular weight oligomers than does the reverse orientation because the V_{L}-V_{H} orientation is more constrained (Kortt A et al., Protein Eng 10: 423-33 (1997); Dolezal, O et al., Protein Eng 13: 565-74 (2000); Plückthun A, Pack P, Immunotechnology 3: 83-105 (1997)).

[0210] The same linker has shown variability in its effect on scFv multimerization depending on the V_{H} and V_{L} orientation, such as, e.g., affecting the relative proportions of dimeric to trimeric forms (Le Gall F et al., FEBS Lett 453: 164-8 (1999); Arndt M et al., FEBS Lett 578: 257-61 (2004); Le Gall F et al., J Immunol Methods 285: 111-27 (2004)).

[0211] Camelid V_{H}H immunoglobulin domains have been multimerized using particular hinges and covalently linked multi V_{H}H chains (tandem) (Fraile S et al., Mol Microbiol 53: 1109-21 (2004); Zhang J et al., J Mol Biol 335: 49-56 (2004)). Immunoglobulin domains from Chondrichthyes, such as IgNARs, have been multimerized using certain hinges or cysteine-mediated disulfide bond stabilization (see e.g. Simmons et al., J Immunol Methods 315: 171-84 (2006)).

[0212] Thus, the generation of multivalent CD20-binding molecules comprising various immunoglobulin domains may be controlled by molecular engineering strategies which are either covalent or non-covalent, such as, e.g., covalent strategies involving single-chain tandem arrangements, covalent strategies involving cysteine-mediated, disulfide bond stabilized multimers, and/or non-covalent strategies involving dimerization domains, linker choice, and/or variable domain order. Multiple strategies (e.g., linker-related non-covalent multimerization and covalent disulfide bond stabilization) may be combined when creating structures that are multivalent CD20-binding molecules of the present invention (see e.g. Lu D et al., J Immunol Methods 279: 219-32 (2003)).

[0213] For the purposes of the present invention, the specific order or orientation is not fixed for the toxin effector region(s) and the two or more CD20 binding regions in relation to each other or the entire multivalent CD20-binding molecule of the present invention. The components of the multivalent CD20-binding molecules of the present invention may be arranged in any order provided that the desired activities of the CD20 binding regions and the toxin effector region(s) are not eliminated. Desired activities include providing the multivalent CD20-binding molecule with the ability to, e.g., bind CD20-expressing cells; rapidly induce cellular internalization; cause efficient internalization; intracellularly route to a desired subcellular compartment(s); cause cytostasis; cause cytotoxicity; selectively kill CD20-expressing cells; deliver exogenous materials into the interior of a cell; diagnosis a disease, disorder, or condition; and/or treat a disease, disorder, or condition in a patient in need thereof.

### E. Determining the Relative Proportion(s) of a Multivalent CD20-Binding Molecule to One or More Other CD20-Binding Molecule(s) Present in a Composition of the Present Invention

[0214] The ratios, percentages, and/or relative proportions of different molecular species within a composition of the present invention may be determined by the skilled worker using a technique well-known in the art and/or described herein, such as, e.g., chromatographic, electrophoretic, electrochromatographic, capillary, centrifugation, isoelectric focusing, and microfluidic techniques for analyzing proteinaceous molecules. For example, the size and/or intensity of different “peaks” or “bands” resulting from subjecting a protein sample to any of the aforementioned methods can be used to calculate the relative ratio of different-sized CD20-binding molecules within a composition.

[0215] Because all compositions of the present invention comprise at least one multivalent CD20-binding molecule which comprises at least one proteinaceous component, the skilled worker may use techniques known in the art to determine relative proportions of proteinaceous molecules. For example, the proportions of different proteinaceous molecular species within a composition of the present invention may be determined by amino acid analysis/amino acid quantification techniques known to the skilled worker (see e.g. Bio-Synthesis, Inc., Lewisville, Tex., U.S.). In another example, the relative proportions of different-sized proteinaceous molecules within a composition of the present invention may be determined using chromatographic, electrophoretic, electrochromatographic, and/or density-gradient ultra-centrifugation techniques known to the skilled worker and/or described herein, such as, e.g., via gel electrophoresis and densitometry analysis of the results.

[0216] The skilled worker may use software methods known in the art and/or described herein to perform analysis of data obtained from, inter alia, amino acid quantification, chromatographic, electrophoretic, electrochromatographic, and density-gradient ultra-centrifugation assays to determine the proportions of different molecular species present in a composition of the present invention. For example, the skilled worker may use software methods known in the art to perform peak-integration analysis of chromatographic, electrophoretic, and/or electrochromatographic data, such as, e.g., size-exclusion chromatographic (SEC) data, in order to compare the relative proportion(s) of different molecular species present in a composition of the present invention. Through the use of molecular-size migration standards (e.g., gel filtration and ion-exchange standards) and knowledge of possible molecular species present in a composition of the present invention, the size of molecular species in a peak may be estimated and the identity of the molecular species in a peak may be inferred. Alternatively or in addition, complimentary methods (e.g. sodium dodecyl sulfate, polyacrylamide gel electrophoresis(SDS-PAGE) or mass spectroscopy) known to the skilled worker and/or described herein may be used to determine the molecule(s) composed in certain peaks.

[0217] Peak integration calculations can be used to determine various curve characteristics including peak areas, retention times, peak heights, peak widths, and percentage of peak area to total peak areas. For any peak integration analysis, a baseline may be calculated first, such as, e.g., using an automatic calculation combined with a blank curve (e.g. data collected from a solvent or mobile phase blank run), blank curve subtraction, or zero baseline. Certain settings, such as, e.g., structure width, baseline noise parameter(s), baseline slope limit or threshold slope setting, maximum baseline limit, and/or minimum distance between data points, may be adjusted in certain situations. For any chromatographic, electrophoretic, and/or electrochromatographic data analysis, the scope of analysis can be limited to certain retention time ranges (e.g., to avoid the column inclusion volume and/or to avoid data from retention times beyond the exclusion limit). User editing of peak window limits and rejection of peak assignments may be performed where appropriate or via changing settings like minimum area and/or minimum height.

[0218] Amino acid quantification, chromatographic, electrophoretic, electrochromatographic, and/or density-gradient ultra-centrifugation methods known to the skilled worker and/or described herein may be used to determine: 1) relative concentration ratios of different CD20-binding molecules within a composition of the present invention, 2) relative molar ratios of different CD20-binding molecules within a composition of the present invention, 3) relative mass ratios of different CD20-binding molecules within a composition of the present invention, and/or 4) relative molal concentration ratios of different CD20-binding molecules within a composition of the present invention. For example, the relative proportion of multivalent CD20-binding molecule in a composition of the present invention can be expressed as a percentage (whether of concentrations, molarities, masses, or molalities) calculated from the total multivalent CD20-binding molecule divided by the total proteinaceous species multiplied by 100. Alternatively, the relative proportion of multivalent CD20-binding molecule in a composition of the present invention can be expressed as a ratio of concentrations, molarities, masses, or molalities using the measurement of a total multivalent CD20-binding molecule species to the measurement of another molecular species regardless of it being a different multivalent CD20-binding molecule species or a non-CD20-binding molecular species.

[0219] In the Examples below, fast protein liquid chromatography size exclusion (FPLC-SEC) and high performance liquid chromatography size exclusion (HPLC-SEC) analyses of CD20-binding molecule compositions were used to determine the relative amounts of multivalent CD20-binding molecules of different sizes present in a composition as well as the relative amounts of multivalent CD20-binding molecules to other molecules like monovalent CD20-binding molecules, e.g., ratios between monovalent, divalent, and higher-valence CD20-binding proteinaceous species present in the compositions were determined.

[0220] One example of a method known in the art with which the skilled worker may use to determine ratios and/or percentages of different molecular species within a composition of the present invention is dynamic light scattering or photon correlation spectroscopy (see e.g., Lamkemeyer T et al., FEBS J 273: 3393-410 (2006); Rousselot M et al., FEBS J 273: 4055-71 (2006); Bruneaux M et al., Curr Protein Pept Sci 9: 15-80 (2008)).

[0221] Another example of a method known in the art with which the skilled worker may use to determine ratios and/or percentages of different molecular species within a composition of the present invention is the Protein 230 Assay using the Agilent Bioanalyzer running Agilent 2100 Expert software (Agilent Technologies, Inc., Santa Clara, Calif., U.S.). The Protein 230 Assay can be used to estimate the quantity, molecular weight, and purity of a multivalent CD20-binding molecule composition of the present invention. The Protein 230 Assay produces data presented as gel-like images with “bands” and/or electrophenograms with “peaks.” A standard ladder of known marker sizes may be used to create standard gel-like and electrophenogram profiles for each analysis. Then the migration behavior of a sample in the assay is used to predict, inter alia, its size. Laser-induced fluorescence intensity may be used to estimate protein quantity in a sample, individual band, and/or peak.

[0222] In certain embodiments, the multivalent CD20-binding molecule composition of the present invention comprises a multivalent CD20-binding molecule of the present invention, wherein the composition comprises a ratio of monovalent CD20-binding protein concentration to total CD20-binding molecule concentration of less than one to three; and wherein each monovalent CD20-binding protein comprises only one CD20 binding region capable of specifically binding an extracellular part of a CD20 and comprises at least one Shiga toxin effector polypeptide. In certain further embodiments, the multivalent CD20-binding molecule composition comprises the ratio of monovalent CD20-binding protein concentration to total CD20-binding molecule concentration of less than the ratio selected from the following: 1:5, 1:6, 1:7, 1:8, 1:9, 1:10, and 1:11. In certain embodiments, the multivalent CD20-binding molecule composition of the present invention comprises a ratio of multivalent CD20-binding protein concentration to total CD20-binding protein concentration of more than two to three.

[0223] In certain embodiments, the multivalent CD20-binding molecule composition of the present invention comprises a ratio of relatively large valence CD20-binding protein concentration to total CD20-binding protein concentration of less than the ratio selected from the following: 1:4, 1:7, 1:11, 1:21, 1:41, 1:71, 1:111, and 1:161; wherein each relatively large-valence CD20-binding protein comprises three or more CD20 binding regions capable of specifically binding an extracellular part of a CD20 and comprises at least one Shiga toxin effector polypeptide.

[0224] In certain embodiments, the multivalent CD20-binding molecule composition of the present invention comprises a ratio of bivalent CD20-binding molecule concentration to total CD20-binding molecule concentration of more than a ratio selected from the following: 1:2, 2:3, 3:4, 4:5, 5:6, 7:8, 8:9, 9:10, 10:11, 11:12, 12:13, 13:14, and 14:15; wherein each bivalent CD20-binding molecule comprises (1) only two CD20 binding regions capable of specifically binding an extracellular part of a CD20 and (2) one or more Shiga toxin effector polypeptides.

[0225] In certain embodiments, the multivalent CD20-binding molecule composition of the present invention comprises a multivalent CD20-binding molecule of the present invention, wherein the composition comprises a ratio of monovalent CD20-binding molecule mass to total CD20-binding molecule mass of less than one to three; and wherein each monovalent CD20-binding molecule comprises only one CD20 binding region capable of specifically binding an extracellular part of a CD20 and comprises at least one Shiga toxin effector polypeptide. In certain further embodiments, the multivalent CD20-binding molecule composition comprises the ratio of monovalent CD20-binding molecule mass to total CD20-binding protein mass of less than the ratio selected from the following: 1:5, 1:6, 1:7, 1:8, 1:9, 1:10, and 1:11. In certain embodiments, the multivalent CD20-binding molecule composition of the present invention comprises a ratio of multivalent CD20-binding molecule mass to total CD20-binding molecule mass of more than two to three.

[0226] In certain embodiments, the multivalent CD20-binding molecule composition of the present invention comprises a ratio of relatively large valence CD20-binding molecule mass to total CD20-binding molecule mass of less than the ratio selected from the following: 1:4, 1:7, 1:11, 1:21, 1:41, 1:71, 1:111, and 1:161; wherein each relatively large-valence CD20-binding molecule comprises three or more CD20 binding regions capable of specifically binding an extracellular part of a CD20 and comprises at least one Shiga toxin effector polypeptide.

[0227] In certain embodiments, the multivalent CD20-binding molecule composition of the present invention comprises a ratio of bivalent CD20-binding molecule mass to total CD20-binding molecule mass of more than a ratio selected from the following: 1:2, 2:3, 3:4, 4:5, 5:6, 7:8, 8:9, 9:10, 10:11, 11:12, 12:13, 13:14, and 14:15; wherein each bivalent CD20-binding molecule comprises (1) only two CD20 binding regions capable of specifically binding an extracellular part of a CD20 and (2) one or more Shiga toxin effector polypeptides.

[0228] In certain embodiments, the multivalent CD20-binding molecule composition of the present invention comprises a multivalent CD20-binding molecule of the present invention, wherein the composition comprises a ratio of monovalent CD20-binding molecule molarity to total CD20-binding molecule molarity of less than one to 1.5; and wherein each monovalent CD20-binding molecule comprises only one CD20 binding region capable of specifically binding an extracellular part of a CD20 and comprises at least one Shiga toxin effector polypeptide. In certain further embodiments, the multivalent CD20-binding molecule composition comprises the ratio of monovalent CD20-binding molecule molarity to total CD20-binding protein molarity of less than the ratio selected from the following: 1:2, 1:3, 1:4, 1:5, 1:6, 1:7, and 1:8. In certain embodiments, the multivalent CD20-binding molecule composition of the present invention comprises a ratio of multivalent CD20-binding molecule molarity to total CD20-binding molecule molarity of more than one to 1.5.

[0229] In certain embodiments, the multivalent CD20-binding molecule composition of the present invention comprises a ratio of relatively large valence CD20-binding molecule molarity to total CD20-binding molecule molarity of less than the ratio selected from the following: 1:2, 1:3.5, 1:5, 1:11, 1:21, 1:36, 1:55, and 1:59; wherein each relatively large-valence CD20-binding molecule comprises three or more CD20 binding regions capable of specifically binding an extracellular part of a CD20 and comprises at least one Shiga toxin effector polypeptide.

[0230] In certain embodiments, the multivalent CD20-binding molecule composition of the present invention comprises a ratio of bivalent CD20-binding molecule molarity to total CD20-binding molecule molarity of more than a ratio selected from the following: 1:1.5, 2:3, 3:4, 4:5, 5:6, 7:8, 8:9, 9:10, 10:11, 11:12, 12:13, 13:14, and 14:15; wherein each bivalent CD20-binding molecule comprises (1) only two CD20 binding regions capable of specifically binding an extracellular part of a CD20 and (2) one or more Shiga toxin effector polypeptides.

[0231] In certain embodiments, the multivalent CD20-binding molecule composition of the present invention comprises a multivalent CD20-binding molecule of the present invention, wherein the composition comprises a ratio of monovalent CD20-binding molecule molality to total CD20-binding molecule molality of less than one to 1.5; and wherein each monovalent CD20-binding molecule comprises only one CD20 binding region capable of specifically binding an extracellular part of a CD20 and comprises at least one Shiga toxin effector polypeptide. In certain further embodiments, the multivalent CD20-binding molecule composition comprises the ratio of monovalent CD20-binding molecule molality to total CD20-binding protein molality of less than the ratio selected from the following: 1:2, 1:3, 1:4, 1:5, 1:6, 1:7, and 1:8. In certain embodiments, the multivalent CD20-binding molecule composition of the present invention comprises a ratio of multivalent CD20-binding molecule molality to total CD20-binding molecule molality of more than one to 1.5.

[0232] In certain embodiments, the multivalent CD20-binding molecule composition of the present invention comprises a ratio of relatively large valence CD20-binding molecule molality to total CD20-binding molecule molality of less than the ratio selected from the following: 1:2, 1:3.5, 1:5, 1:11, 1:21, 1:36, 1:55, and 1:59; wherein each relatively large-valence CD20-binding molecule comprises three or more CD20 binding regions capable of specifically binding an extracellular part of a CD20 and comprises at least one Shiga toxin effector polypeptide.

[0233] In certain embodiments, the multivalent CD20-binding molecule composition of the present invention comprises a ratio of bivalent CD20-binding molecule molality to total CD20-binding molecule molality of more than a ratio selected from the following: 1:1.5, 2:3, 3:4, 4:5, 5:6, 7:8, 8:9, 9:10, 10:11, 11:12, 12:13, 13:14, and 14:15; wherein each bivalent CD20-binding molecule comprises (1) only two CD20 binding regions capable of specifically binding an extracellular part of a CD20 and (2) one or more Shiga toxin effector polypeptides.

### F. Molecular Stability, Composition Stability, Controlling Multimerization, and Minimizing Aggregation

[0234] For certain applications, the stability of the relative proportion of multivalent CD20-binding molecule(s) to total CD20-binding molecules in a composition of the present invention may be important to the composition's effectiveness. For example in certain medical applications, the stability of the relative proportions of multivalent CD20-binding molecule(s) of the present invention to monovalent CD20-binding molecule(s) may be important. In certain applications, the stability of the relative proportions of bivalent CD20-binding molecules to higher-valence CD20-binding molecules may be important. In certain applications the stability of the relative proportion of bivalent CD20-binding molecules to non-bivalent CD20-binding molecules may be important.

[0235] For certain embodiments, a one or more steps of controlled multimerization of some or all of the components of a multivalent CD20-binding molecule of the present invention may be used to produce a composition of the present invention.

[0236] For certain applications, the minimization or otherwise controlling of unwanted aggregation and/or multimerization of CD20-binding molecules may be important for certain compositions of the present invention. For example with certain proteinaceous therapeutics, the aggregation and/or multimerization of the therapeutic molecule can in certain situations increase the risk for unwanted immune responses in recipients of the proteinaceous therapeutic. In particular, CD20-binding molecule aggregation and/or multimerization to higher molecular weight complexes may increase the risk of unwanted immune responses after administration of certain CD20-binding molecule compositions to certain recipients. In addition, misfolded proteins and degraded protein products can exhibit increased immunogenicity as compared to their properly folded counterparts.

[0237] For all of these reasons and depending on the specific application, the skilled worker will appreciate whether there is a need to consider 1) the stability of multivalent CD20-binding molecules of the compositions of the present invention and 2) the stability of the ratios of different CD20-binding molecules present in compositions of the present invention. For example, in certain embodiments, the multivalent CD20-binding molecule of the present invention and compositions thereof are the result of controlled multimerization and/or certain purification steps. Similarly, in certain embodiments, the multivalent CD20-binding molecule of the present invention will be engineered to eliminate or reduce certain multimerization possibilities. In certain embodiments, the multivalent CD20-binding molecule of the present invention will be designed to avoid the formation of unwanted aggregates, such as, e.g., under certain storage conditions like in an aqueous solution at 8, 4, 2, −4, −10, −20, or −25° C.

[0238] For certain applications of the compositions of the present invention, it may be desirable to minimize in the composition of the present invention the amount of: 1) high molecular weight, multivalent CD20-binding molecules (e.g. molecules greater than 175, 180, 190, 200, or 250 kDa or larger); 2) greatly multivalent CD20-binding molecules (i.e. molecules comprising five or more CD20 binding regions); 3) multimers of CD20-binding molecules which are high molecular weight, multivalent CD20-binding molecules representing #1 and/or greatly multivalent CD20-binding molecules representing #2 (e.g. certain, large, noncovalent multimers of CD20-binding molecules); 3) misfolded proteins (e.g., misfolded CD20-binding proteins or protein components thereof); and/or 4) degradation products (e.g. unwanted protein fragments of a proteinaceous component of a multivalent CD20-binding molecule, such as, e.g., a polypeptide fragment of a Shiga toxin effector region or CD20 binding region). For example, a rationale to minimize the amount of any of the types of molecules listed as #1-#4 above might be for medical applications where the presence of a certain amounts of these molecules might increase the potential for unwanted antigenic and/or immunogenic reactions in a recipient of a compositions of the present invention, such as, e.g., by the presence of these molecules revealing new epitopes or by forming repetitive motifs more readily identified by a recipient's immune system as foreign.

[0239] The skilled worker may use routine methods to assess multimerization states of the multivalent CD20-binding molecules of the present invention and/or molecules present in the compositions of the present invention. The skilled worker may use routine methods to minimize the presence or relative proportion of CD20-binding molecule aggregates, high molecular weight CD20-binding protein multimers, misfolded CD20-binding proteins, and CD20-binding protein degradation products in the compositions of the present invention.

[0240] In certain embodiments of the compositions of the present invention, the relative proportion of bivalent, trivalent, and/or tetravalent forms of multivalent CD20-binding molecule(s) is maximized, such as by further purifying away from monovalent CD20-binding protein(s), higher molecular weight CD20-binding molecule(s), misfolded CD20-binding protein(s), and/or protein degradation product(s).

[0241] The skilled worker may use routine methods to create a multivalent CD20-binding molecule of the present invention, and compositions thereof. The skilled worker may use routine methods to stabilize the relative proportions of certain multivalent CD20-binding molecules to other molecules in a composition of the present invention, including the proportions of different multimeric forms of CD20-binding molecules, such as, e.g., the proportions of covalently linked, multimeric, multivalent CD20-binding molecules to non-covalently linked, multimeric, multivalent CD20-binding molecules (see e.g. Gil D, Schrum A, Adv Biosci Biotechnol 4: 73-84 (2013); WO2005000898). For example, the multimerization of CD20-binding molecule(s) in compositions of the present invention may be controlled and/or minimized, such as, e.g., by choosing certain linkers to link and/or associate different components and/or subunits of the CD20-binding molecule(s) present in the compositions of the present invention. For example, in certain embodiments, the CD20 binding region of the multivalent CD20-binding molecule of the present invention is engineered to minimize the formation of unwanted, intermolecular associations, multimers, and/or aggregates, such as, e.g., by using disulfide-stabilized scFvs, Fv fragments, or Fabs (see e.g. Reiter Y et al., J Biol Chem 269: 18327-31 (1994); Kuan C, Pastan I, Biochemistry 35: 2872-7 (1996); Almog O et al., Proteins 31: 128-38 (1998); Schoonjans R et al., J Immunol 165: 7050-7 (2000); Olafsen T et al., Protein Eng Des Sel 17: 21-7 (2004); Gil D, Schrum A, Adv Biosci Biotechnol 4: 73-84 (2013); U.S. 20120283418); base loop connections (see e.g. Brinkmann U et al., J Mol Biol 268: 107-17 (1997)); and/or other modifications, such as the addition of charged resides, glycans, and/or immunoglobulin-domain truncations (see e.g. Gong R et al., Mol Pharm 10: 2642-52 (2013); Lee C et al., Trends Biotechnol 31: 612-20 (2013)).

[0242] In certain embodiments of the present invention, the multivalent CD20-binding molecule of the present invention comprises a CD20 binding region which is an scFv engineered not to aggregate, such as, e.g., by using a shorter linker (typically less than twelve amino acid residues) and/or disulfide-stabilized linker that links the heavy and light chain regions of the scFv (see e.g., Brinkmann U et al., Proc Natl Acad Sci USA 90: 7538-42 (1993); Whitlow M et al., Protein Engineering 6: 989-95 (1993); Reiter Y et al., Biochemistry 33: 5451-9 (1994); Gong R et al., Molecular Pharmaceutics 10: 2642-52 (2013)).

[0243] In certain embodiments, the multivalent CD20-binding molecule composition of the present invention minimizes the proportion relative to other CD20-binding molecules of certain, multivalent CD20-binding molecule(s) with a valence greater than two. In certain embodiments, the multivalent CD20-binding molecule composition of the present invention comprises a relative percentage of multivalent CD20-binding molecules with a valence of greater than four which is 15%, 10%, 7.5%, 5%, 2%, 1%, or less of the total CD20-binding molecules in the composition. In certain embodiments, a multivalent CD20-binding molecule composition of the present invention comprises a relative percentage of CD20-binding molecules with a valence of greater than three to other CD20-binding molecules which is 15%, 10%, 7.5%, 5%, 2%, 1%, or less of the total CD20-binding molecules in the composition. In certain embodiments, a multivalent CD20-binding molecule composition of the present invention comprises a percentage of CD20-binding molecules with a valence greater than two which is 15%, 10%, 7.5%, 5%, 2%, 1%, or less of the total CD20-binding molecules in the composition.

[0244] In certain embodiments, the composition of the present invention maximizes the relative proportion of multivalent CD20-binding molecule(s) with exactly two CD20 binding regions to total CD20-binding molecules. Thus, in certain embodiments, a composition of the present invention comprises a proportion of CD20-binding molecule with only two CD20 binding regions which is 80%, 85%, 88%, 90%, 92%, 93%, or more of the total CD20-binding molecules in the composition.

[0245] For certain applications, it may be desirable to maintain stability (e.g., the stability of associations and/or linkages between components and/or subunits of the multivalent CD20-binding molecules) of multivalent CD20-binding molecule(s) in a multivalent composition of the present invention, such as, e.g., to minimize degradation during formulation, storage (such as, e.g., storage in an aqueous solution at 8, 4, 2, −4, −10, −20, or −25° C.), and/or after administration to a recipient. The skilled worker may use well known methods to minimize component or subunit separation for a multivalent CD20-binding molecule of the present invention, such as, e.g., by using high-stability linkages between the Shiga toxin effector polypeptide(s) and binding region(s) and/or by engineering disulfide linkages between components, regions, or sub-regions of a multivalent CD20-binding molecule or between monovalent CD20-binding proteins to generate multivalent CD20-binding protein(s) of the present invention (see e.g. Gil D, Schrum A, Adv Biosci Biotechnol 4: 73-84 (2013)). The skilled worker may use the addition or maintenance of intermolecular disulfide bonds to stabilize certain CD20 binding regions of the multivalent CD20-binding molecules of the present invention (see e.g. Glockshuber R et al., Biochemistry 29: 1362-7 (1990); Stanfield R et al., Science 305: 1770-3 (2004); Hagihara Y et al., J Biol Chem 282: 36489-95 (2007); Chan P et al., Biochemistry 47: 11041-54 (2008); Saerens D et al., J Mol Biol 478-88 (2008); Hussack G et al., PLoS One 6: e28218 (2011); Govaert J et al., J Biol Chem 287: 1970-9 (2012); Kim D et al., Protein Eng Des Sel 25: 581-9 (2012); Gil D, Schrum A, Adv Biosci Biotechnol 4: 73-84 (2013); McConnell A et al., Protein Eng Des Sel 25: 581-9 (2013); Feige Metal., Proc Natl Acad Sci USA 111: 8155-60 (2014); Hagihara Y, Saerens D, Biochim Biophys Acta 1844: 2016-2023 (2014); Kim D et al., Mabs 6: 219-35 (2014)).

[0246] In certain embodiments, the multivalent CD20-binding molecule of the present invention comprises a CD20 binding region(s) which comprises an immunoglobulin domain and/or Ig-fold structure having an intra-domain disulfide bond, such as, e.g., the disulfide bond found natively between the B and F β strands of certain immunoglobulins and/or a disulfide bond between their heavy and light chains of or derived from an immunoglobulin. However, in certain embodiments of the multivalent CD20-binding molecules of the present invention, the molecules are very stable even though they do not comprise an intra-domain disulfide bond or any intra-domain disulfide bond within one or more CD20 binding regions (see e.g. Proba K et al., Biochemistry 37: 13120-7 (1998); Wörn A, Plückthun A, Biochemistry 37: 13120-7 (1998); Wörn A, Plückthun A, FEBS Lett 427: 357-61 (1998); Ramm K et al., J Mol Biol 290: 535-46 (1999); Tanaka T, Rabbitts T, J Mol Biol 376: 749-57 (2008)).

[0247] In certain embodiments, the composition of the present invention comprises a multivalent CD20-binding molecule with one or more disulfide bonds between two or more cysteine residues contained within Shiga toxin effector polypeptide regions of different polypeptide chains. In certain embodiments, the composition of the present invention comprises a proteinaceous, dimeric, multivalent CD20-binding molecule with five disulfide bonds, such as, e.g., the dimeric, multivalent CD20-binding molecule comprising: 1) four, intramolecular, disulfide bonds representing two disulfide bonds per immunoglobulin-derived CD20 binding region and where each disulfide bond involves a pair of cysteine residues and wherein one cysteine residue of each pair is within an immunoglobulin heavy chain derived domain and the other cysteine residue of the pair is within an immunoglobulin light chain derived domain; and 2) one, intermolecular, disulfide bond bridging two, Shiga toxin effector regions wherein the disulfide bond occurs between a pair of cysteine residues where each cysteine residue of the pair is within a Shiga toxin effector region but the Shiga toxin effector regions are within different polypeptide chains representing different subunits of a multivalent CD20-binding protein of the present invention.

[0248] In certain embodiments, the multivalent CD20-binding molecule of the present invention comprises a CD20 binding region derived from an immunoglobulin which has been engineered with certain camelid V_{H}H “tetrad” mutations to improve solubility, to improve stability, and/or otherwise “camelize” the binding region (see e.g. Vincke C et al., J Biol Chem 284: 3273-84 (2009); Perchiacca J et al., Proteins 79: 2637-47 (2011); Gil D, Schrum A, Adv Biosci Biotechnol 4: 73-84 (2013)).

### II. Examples of Specific Structural Variations of the Multivalent CD20-Binding Molecules of the Present Invention

[0249] In certain embodiments, the multivalent CD20-binding molecule of the present invention comprises 1) two or more proteinaceous CD20 binding regions, each capable, on its own, of specifically binding an extracellular part of CD20; and 2) one or more Shiga toxin effector regions comprising a polypeptide derived from the amino acid sequence of the A Subunit of at least one member of the Shiga toxin family.

[0250] In certain embodiments, the multivalent CD20-binding molecule of the present invention comprises two or more CD20 binding regions comprising an immunoglobulin-type polypeptide selected for specific and high-affinity binding to the cellular surface of a CD20+ cell (see e.g. Table 9, infra).

[0251] In certain embodiments of the multivalent CD20-binding molecule of the present invention, the CD20 binding region comprises a polypeptide(s) selected from the group consisting of: a) a heavy chain variable (V_{H}) domain comprising i) a HCDR1 comprising or consisting essentially of the amino acid sequence as shown in SEQ ID NO:5, SEQ ID NO:11, SEQ ID NO:17, SEQ ID NO:23, SEQ ID NO:29, or SEQ ID NO:35; ii) a HCDR2 comprising or consisting essentially of the amino acid sequence as shown in SEQ ID NO:6, SEQ ID NO:12, SEQ ID NO:18, SEQ ID NO:24, SEQ ID NO:30, or SEQ ID NO:36; and iii) a HCDR3 comprising or consisting essentially of the amino acid sequence as shown in SEQ ID NO:7, SEQ ID NO:13, SEQ ID NO:19, SEQ ID NO:25, SEQ ID NO:31, or SEQ ID NO:37; and b) a light chain variable (V_{L}) domain comprising i) a LCDR1 comprising or consisting essentially of the amino acid sequence as shown in SEQ ID NO:8, SEQ ID NO:14, SEQ ID NO:20, SEQ ID NO:26, SEQ ID NO:32, or SEQ ID NO:38; ii) a LCDR2 comprising or consisting essentially of the amino acid sequence as shown in SEQ ID NO:9, SEQ ID NO:15, SEQ ID NO:21, SEQ ID NO:27, SEQ ID NO:33, or SEQ ID NO:39; and iii) a LCDR3 comprising or consisting essentially of the amino acid sequence as shown in SEQ ID NO:10, SEQ ID NO:16, SEQ ID NO:22, SEQ ID NO:28, SEQ ID NO:34, or SEQ ID NO:40. In certain further embodiments, the multivalent CD20-binding molecule of the present invention comprises the CD20 binding region comprising or consisting essentially of amino acids 1-232, 1-233, 1-234, 1-235, 1-236, 1-242, 1-243, 1-244, 1-245, 1-246, 1-252, 1-253, 1-254, 1-255, or 1-256 of any one of SEQ ID NOs: 47-119 and 176-248.

[0252] In certain embodiments, the multivalent CD20-binding molecule of the present invention comprises one or more Shiga toxin effector polypeptides(s), each comprising or consisting essentially of the polypeptide selected from the group consisting of: (a) amino acids 75 to 251 of SEQ ID NO:1, SEQ ID NO:2, or SEQ ID NO:3; (b) amino acids 1 to 241 SEQ ID NO:1, SEQ ID NO:2, or SEQ ID NO:3; (c) amino acids 1 to 251 of SEQ ID NO:1, SEQ ID NO:2, or SEQ ID NO:3; and (d) amino acids 1 to 261 of SEQ ID NO:1, SEQ ID NO:2, or SEQ ID NO:3.

[0253] In certain embodiments, the multivalent CD20-binding molecule of the present invention comprises one or more Shiga toxin effector polypeptides comprising the substitution selected from at least one of the following: A231E, R75A, Y77S, Y114S, E167D, R170A, R176K, and W203A as positioned in the polypeptide shown in SEQ ID NO:1, SEQ ID NO:2, SEQ ID NO:3, and/or SEQ ID NO:4.

[0254] In certain embodiments, the multivalent CD20-binding molecule of the present invention comprises or consists essentially of two proteins, and comprises at least one disulfide bond. In certain further embodiments, the disulfide bond is between a pair of cysteine residues wherein a first cysteine residue of the pair is positioned at amino acid residue 242 or 261 of the polypeptide shown in SEQ ID NO:1 or SEQ ID NO:2 or at amino acid residue position 241 or 260 in the polypeptide shown in SEQ ID NO:3 in a first Shiga toxin effector polypeptide region and a second cysteine residue of the pair is positioned at amino acid residue 242 or 261 of the polypeptide shown in SEQ ID NO:1 or SEQ ID NO:2 or at amino acid residue position 241 or 260 in the polypeptide shown in SEQ ID NO:3 of second Shiga toxin effector polypeptide region (see e.g. FIG. 1A and FIG. 1B).

[0255] In certain embodiments, the multivalent CD20-binding molecule of the present invention comprises the protein shown in any one of SEQ ID NOs: 47-304, and optionally, the protein further comprises an amino-terminal methionine residue. In certain further embodiments, the multivalent CD20-binding molecule of the present invention comprises or consists essentially of two proteins, each protein selected from any one of the polypeptides shown in SEQ ID NOs: 47-304, and optionally, each protein further comprises an amino-terminal methionine residue. In certain further embodiments, each of the two proteins is selected from any one of the proteins shown in SEQ ID NOs: 47-175, and the multivalent CD20-binding molecule further comprises five disulfide bonds, each linking the sulfhydryl groups of a pair of cysteine residues; and wherein four of the five disulfide bonds involve cysteine residues which are in an immunoglobulin domain of a CD20-binding region of the protein linked to another cysteine residue in an immunoglobulin domain of the same CD20-binding region, and wherein the remaining disulfide bond of the five disulfide bonds involves a cysteine residue in a first protein of the two proteins shown in SEQ ID NOs: 47-175 at the position selected from the group consisting of: 242, 482, 483, 484, 490, 491, 492, 493, 494, 495, 499, 500, 501, 502, 503, 504, 505, 510, 511, 512, 513, and 521 linked to a cysteine residue from a second protein of the two proteins shown in SEQ ID NOs: 47-175 at the position selected from the group consisting of: 242, 482, 483, 484, 490, 491, 492, 493, 494, 495, 499, 500, 501, 502, 503, 504, 505, 510, 511, 512, 513, and 521.

[0256] In certain embodiments, the multivalent CD20-binding molecule of the present invention is a homodimer and consists essentially of (a) two identical polypeptides, each represented by SEQ ID NO:49, and (b) a cysteine disulfide bond linking the two identical polypeptides involving the cysteine at amino acid position 490 of each of the two identical polypeptides.

[0257] In certain embodiments, the multivalent CD20-binding molecule of the present invention is a homodimer and consists essentially of (a) two identical polypeptides, each represented by only one of SEQ ID NO:50, SEQ ID NO:61, SEQ ID NO:73, SEQ ID NO:96, SEQ ID NO:101, or SEQ ID NO:102, and (b) a cysteine disulfide bond linking the two identical polypeptides involving the cysteine at amino acid position 501 of each of the two identical polypeptides.

[0258] In certain embodiments, the multivalent CD20-binding molecule of the present invention is a homodimer and consists essentially of (a) two identical polypeptides, each represented by only one of SEQ ID NO:53, SEQ ID NO:63, SEQ ID NO:66, SEQ ID NO:75, SEQ ID NO:83, SEQ ID NO:89, or SEQ ID NO:95, and (b) a cysteine disulfide bond linking the two identical polypeptides involving the cysteine at amino acid position 512 of each of the two identical polypeptides.

[0259] In certain embodiments, the multivalent CD20-binding molecule of the present invention is a homodimer and consists essentially of (a) two identical polypeptides, each represented by only one of SEQ ID NO:54, SEQ ID NO:57, SEQ ID NO:69, SEQ ID NO:78, SEQ ID NO:82, SEQ ID NO:84, SEQ ID NO:87, SEQ ID NO:88, SEQ ID NO:94, SEQ ID NO:110, SEQ ID NO:111, or SEQ ID NO:115, and (b) a cysteine disulfide bond linking the two identical polypeptides involving the cysteine at amino acid position 503 of each of the two identical polypeptides.

[0260] In certain embodiments, the multivalent CD20-binding molecule of the present invention is a homodimer and consists essentially of (a) two identical polypeptides, each represented by only one of SEQ ID NO:55, SEQ ID NO:64, SEQ ID NO:67, SEQ ID NO:76, SEQ ID NO:90, SEQ ID NO:92, SEQ ID NO:93, SEQ ID NO:97, or SEQ ID NO:98, and (b) a cysteine disulfide bond linking the two identical polypeptides involving the cysteine at amino acid position 502 of each of the two identical polypeptides.

[0261] In certain embodiments, the multivalent CD20-binding molecule of the present invention is a homodimer and consists essentially of (a) two identical polypeptides, each represented by only one of SEQ ID NO:56, SEQ ID NO:68, SEQ ID NO:91, SEQ ID NO:99, SEQ ID NO:103, or SEQ ID NO:104, and (b) a cysteine disulfide bond linking the two identical polypeptides involving the cysteine at amino acid position 492 of each of the two identical polypeptides.

[0262] In certain embodiments, the multivalent CD20-binding molecule of the present invention is a homodimer and consists essentially of (a) two identical polypeptides, each represented by only one of SEQ ID NO:58, SEQ ID NO:70, or SEQ ID NO:81, and (b) a cysteine disulfide bond linking the two identical polypeptides involving the cysteine at amino acid position 493 of each of the two identical polypeptides.

[0263] In certain embodiments, the multivalent CD20-binding molecule of the present invention is a homodimer and consists essentially of (a) two identical polypeptides, each represented by only one of SEQ ID NOs: 249-304, and (b) a cysteine disulfide bond linking the two identical polypeptides involving the cysteine at amino acid position 242 of each of the two identical polypeptides.

[0264] It is within the scope of the present invention to use fragments, variants, and/or derivatives of the proteins of the multivalent CD20-binding molecules of the present invention, such as, e.g., proteins which contain two or more, functional, CD20 binding regions, and even more preferably two CD20 binding regions capable of binding an extracellular part of CD20 with high affinity (e.g. as determined using the CD20 binding region's K_{D} empirically measured with a CD20-expressing cell(s) or in vitro with a CD20 target molecule(s)). For example, while the invention provides polypeptides that can bind to CD20, any binding region that binds to an extracellular part of CD20 with a dissociation constant of 10⁻⁵ to 10⁻¹² moles per liter, preferably less than 200 nM, may be suitable for use in making multivalent CD20-binding molecules of the present invention, and related compositions and methods of the invention.

### III. General Functions of the Multivalent CD20-Binding Molecule of the Present Invention and Compositions Thereof

[0265] The present invention provides various multivalent CD20-binding molecules and compositions thereof wherein each multivalent CD20-binding molecule comprises 1) two or more CD20 binding regions for cell targeting; and 2) at least one Shiga toxin effector polypeptide region. The linking of multiple cell targeting, CD20 binding regions with Shiga toxin Subunit A derived polypeptides enables the cell type-specific targeting of the potent Shiga toxin cytotoxicity and/or cytostasis, as well as the ability to deliver exogenous materials into the interiors of CD20+ cell types, such as, e.g., intracellularly cytotoxic agents.

[0266] In certain embodiments, the multivalent CD20-binding molecule of the present invention, and compositions thereof, may be used to target potent Shiga toxin cytotoxicity, cytostasis, rapid intracellular delivery of cargo, or other cellular internalization function to various, CD20-expressing cell types. In certain embodiments, the multivalent CD20-binding molecule of the present invention are capable of binding extracellular CD20 molecules associated with the cell surfaces of particular cell types and rapidly entering those cells. Once internalized within a targeted cell, certain embodiments of the multivalent CD20-binding molecules of the present invention are capable of routing a cytotoxic Shiga toxin effector polypeptide fragment into the cytosol of the target cell. Once in the cytosol of a targeted cell, certain embodiments of the cytotoxic multivalent CD20-binding molecules of the present invention are capable of enzymatically inactivating ribosomes, interfering with cell homeostasis, and eventually killing the cell. In certain embodiments, the multivalent CD20-binding molecule of the present invention, and compositions thereof, may be used to deliver additional exogenous materials into CD20-expressing cells, such as, e.g., peptides, polypeptides, proteins, polynucleotides, and detection promoting agents to label the interiors of target cells for collecting diagnostically useful information.

### A. CD20+ Cell Kill Via Targeted Shiga Toxin Cytotoxicity

[0267] Because members of the Shiga toxin family are adapted to killing eukaryotic cells, multivalent CD20-binding molecules comprising a Shiga toxin effector region can show potent cell-kill activity. The A Subunits of members of the Shiga toxin family comprise enzymatic domains capable of killing a eukaryotic cell once in the cell's cytosol. Certain embodiments of the multivalent CD20-binding molecules of the present invention, and compositions thereof, take advantage of this cytotoxic mechanism. Certain embodiments of the multivalent CD20-binding molecules of the present invention, and compositions thereof, exhibit cell-targeted cytotoxicity via their Shiga toxin effector polypeptide regions.

[0268] In certain embodiments of the multivalent CD20-binding molecules of the present invention, and compositions thereof, upon contacting a cell physically coupled with extracellular CD20 having the extracellular part bound by the binding regions of the multivalent CD20-binding molecule of the present invention, the multivalent CD20-binding molecule of the present invention, and/or a composition thereof, is capable of causing the death of the cell. In certain further embodiments, the capability to cause the death of the cell requires an intracellular mechanism, such as, e.g., a catalytic activity of a toxin effector polypeptide region.

[0269] The killing of a CD20-expressing cell(s) may be accomplished using a cytotoxic multivalent CD20-binding molecule of the present invention, and/or a composition thereof, under varied conditions of CD20-expressing target cells, such as an ex vivo manipulated target cell, a target cell cultured in vitro, a target cell within a tissue sample cultured in vitro, and/or a target cell in vivo.

[0270] The expression of CD20 at a cellular surface need not be native to achieve targeted cell killing by a cytotoxic, multivalent CD20-binding molecule of the present invention and/or composition thereof. Cell-surface expression of CD20 by a target cell could be the result of an infection, the presence of a pathogen, and/or the presence of an intracellular microbial pathogen. Expression of CD20 by a target cell could be artificial or engineered such as, for example, by forced or induced expression after infection with a viral expression vector, see e.g. adenoviral, adeno-associated viral, and retroviral systems. An example of inducing expression of CD20 is the up-regulation of CD20 induced by exposing a cell to ionizing radiation.

[0271] Whether a particular cell type or cell population expresses CD20 at a cellular surface can be determined by methods well known in the art. For example, both FACS methods and immunohistochemical methods using anti-CD20 antibodies are known in the art may be used to as assays to determine cells which express CD20 at a cellular surface (CD20+ cells) and, thus, determine which cells have a particular extracellular CD20 target biomolecule physically coupled to them. In addition, the density of CD20 expression at a cell surface of a CD20+ cell type may be assayed using methods known in the art, including but not limited to the methods mentioned herein.

[0272] The effectiveness and potency of multivalent CD20-binding molecules of the present invention toward different target cells may be influenced by the densities of their CD20 target antigen(s) on a target cell surface, the locations of their epitope-binding interaction with CD20, the rates of CD20 internalization of cell-surface bound CD20 of different target cells, and the intracellular itinerary of different target cells.

[0273] The cell surface representation and/or density of an extracellular CD20 target may influence the applications for which certain multivalent CD20-binding molecules of the present invention, or compositions thereof, may be most suitably used. Differences in cell surface representation and/or density of certain extracellular CD20 target(s) between cells may alter the internalization and/or cytotoxicity of a given multivalent CD20-binding molecule of the invention, or composition thereof, both quantitatively and qualitatively. The total cell surface representation of CD20 and/or of certain CD20 epitope(s) on a particular cell or population of cells may be determined using methods known to the skilled worker, such as by using fluorescence-activated cell sorting (FACS), flow-cytometry techniques.

[0274] The cell surface representation and/or density of a given extracellular CD20 target (or extracellular epitope of a given CD20 target) may influence the applications for which certain multivalent CD20-binding molecules of the present invention may be most suitably used. Differences in cell surface representation and/or density of a given CD20 target(s) or epitope(s) between cells may alter, both quantitatively and qualitatively, the efficiency of cellular internalization, and/or potency of cytotoxicity of a given multivalent CD20-binding molecule of the present invention. The cell surface representation and/or density of a given extracellular CD20 target or epitope may vary greatly among CD20 positive cells or even on the same cell at different points in the cell cycle or cell differentiation. The total cell surface representation of a given extracellular CD20 target (e.g. a particular extracellular epitope of a given CD20) on a particular cell or population of cells may be determined using methods known to the skilled worker, such as methods involving fluorescence-activated cell sorting (FACS) flow cytometry.

[0275] An example of a FACS based assay for determining cell surface representation of an extracellular CD20 antigen for a particular cell type is as follows. An anti-CD20 antibody is labeled with a fluorophore, such as, e.g. a fluorescein derivative like fluorescein isothiocyanate (FITC), an Alexa Fluor® Dye like Alexa488, or some other fluorescent tag. A population of cells of the cell type of interest are grown and harvested at a density of 1×10⁶ cells per milliliter (mL) and treated with 0.1 to 1.0 milligrams (mg) per mL (mg/mL) of labeled anti-CD20 antibody for 30 minutes on ice. Then the cold, treated cells are washed twice to remove unbound antibody. Alternatively, an unlabeled anti-CD20 antibody is used and is detected by a secondary antibody, such as, e.g., an anti-mouse IgG conjugated with a fluorophore, such as, e.g., Alexa488 or FITC. Direct immunofluorescence is used to quantify the amount of extracellular CD20 such as by using a FACS device.

[0276] For example, cell-surface CD20 is usually expressed at high levels by B-cells as compared to other cell surface targets, such as at levels of 250,000 cell-surface CD20 molecules per cell, which provides a large density of extracellular CD20 targets for the multivalent CD20-binding molecules of the present invention.

[0277] For certain embodiments of the multivalent CD20-binding molecule, and compositions thereof, the ability, upon contacting a cell physically coupled with extracellular CD20 having the extracellular part bound by the binding regions of the multivalent CD20-binding molecule, of killing the cell may or may not depend on the catalytic activity of one or more Shiga toxin effector regions of the multivalent CD20-binding molecule. In certain embodiments of the multivalent CD20-binding molecules of the present invention, and compositions thereof, upon contacting a cell physically coupled with extracellular CD20 having the extracellular part bound by the binding regions of the multivalent CD20-binding molecule, the multivalent CD20-binding molecule of the present invention, and/or a composition thereof, is capable of causing the death of the cell. In certain further embodiments, the multivalent CD20-binding molecule of the present invention either (1) comprises a Shiga toxin effector region(s) that lacks catalytic activity and/or is not capable of causing the death of a cell through a Shiga toxin effector-mediated, ribosome inactivation mechanism; or (2) does not comprise any Shiga toxin effector region.

[0278] Certain embodiments of the multivalent CD20-binding molecules of the present invention, and enriched compositions thereof, exhibit unexpectedly great, cell-targeted cytotoxicity potencies compared to monovalent CD20-binding molecules and/or compositions thereof which lack multivalent CD20-binding molecule(s) of the present invention or have lower proportions of multivalent CD20-binding molecule(s) of the present invention to the total CD20-binding molecule than an enriched composition of the present invention (i.e., a multivalent CD20-binding molecule composition of the present invention). Without being bound by theory, the CD20-binding valence-related improvement in function(s) between monovalent CD20-binding molecules and multivalent CD20-binding molecules of the present invention result from the multivalent CD20-binding structure in a way that is believed to be more than just a result of CD20-binding valency effect(s), but rather, seems to result from a de novo property(ies) of the multivalent CD20-binding structures of the present invention that is not present in monovalent CD20-binding variants. Without being bound by theory, multivalent CD20-binding molecules of the present invention, and enriched compositions thereof, that exhibit cytotoxic potencies that are unexpectedly greater in a qualitative and/or quantitative manner compared to a monovalent CD20-binding variant may exhibit such levels of cytotoxic potency as a result of an improvement(s), such as, e.g., in the molecule's efficiency of 1) cellular internalization into a CD20-expressing cell(s), 2) intracellular routing after cellular internalization to a certain subcellular compartment(s), and/or 3) delivering a Shiga toxin effector polypeptide to the cytosol.

[0279] In certain embodiments, the multivalent CD20-binding molecule of the present invention comprises one or more monovalent CD20-binding molecule components; and whereby upon administration of the multivalent CD20-binding molecule of the present invention, or a composition thereof, to a population of cells physically coupled with CD20 (e.g. CD20+ cells), which have the extracellular part bound by two or more CD20 binding regions of the multivalent CD20-binding molecule, the multivalent CD20-binding molecule exhibits a cytotoxic effect which is greater than a cytotoxic effect resulting from administration of an equivalent amount, mass, or molarity of any one of the monovalent CD20-binding molecule components of the multivalent CD20-binding molecule to a population of the same type of CD20 positive cells under same conditions (e.g., same temperature, cell density, and assay time duration) by a factor of 1.33, 1.5, 1.75, 2, 3, 5, 7.5, 10, 20, 100, or greater than (1) the change in CD20-binding valence between the monovalent CD20-binding component and the multivalent CD20-binding molecule; (2) the change in equilibrium binding constants (K_{D}) between the multivalent CD20-binding molecule and the monovalent CD20-binding component for binding to CD20 or CD20-expressing cell; and/or (3) the change in affinity constant (1/K_{D}) between the multivalent CD20-binding molecule and the monovalent CD20-binding component for binding to CD20 or CD20-expressing cell. For certain further embodiments, members of the population of cells express at a cellular surface the CD20 which (1) have the extracellular part bound by the two or more CD20 binding regions of the multivalent CD20-binding molecule wherein each CD20 binding region is tested in isolation from the multivalent CD20-binding molecule, (2) have a transmembrane domain, and (3) remain physically coupled to the cell. For certain further embodiments, members of the population of cells are CD20 positive cells. For certain embodiments, the members of the population of cells are physically coupled with a significant amount of extracellular CD20 which (1) have the extracellular part bound by the two or more CD20 binding regions of the multivalent CD20-binding molecule. For certain further embodiments, members of the population of cells are descendants or members of a B-cell lineage. For certain further embodiments, members of the population of cells are selected from the group consisting of: malignant B-cell, B-cell leukemia cell, B-cell lymphoma cell, B-cell myeloma cell, acute myeloid leukemia cell, acute non-lymphocytic leukemia cell, B-cell chronic lymphocytic leukemia cell, B-cell lymphoma cell, B-cell non-Hodgkin's lymphoma cell, B-cell precursor acute lymphoblastic leukemia cell, B-cell prolymphocytic leukemia cell, Burkitt's lymphoma cell, chronic lymphocytic leukemia cell, chronic myeloid leukemia cell, diffuse large B-cell lymphoma cell, follicular lymphoma cell, hairy cell leukemia cell, Hodgkin's lymphoma cell, immunoblastic large cell lymphoma cell, mantle cell lymphoma cell, melanoma cell, multiple myeloma cell, neoplastic plasma cell, nodular lymphocyte predominant Hodgkin's lymphoma cell, non-Hodgkin's lymphoma cell, plasmablastic lymphoma cell, plasma cell myeloma cell, precursor B-lymphoblastic lymphoma cell, small lymphocytic lymphoma cell, malignant T-cell, T-cell leukemia cell, T-cell lymphoma cell, T-cell large granular lymphocyte leukemia cell, T-cell prolymphocytic leukemia, healthy B-cell lineage cell, and/or healthy T-cell.

### B. Selective Cytotoxicity Among a Mixture of Different Cells

[0280] The cytotoxic, multivalent CD20-binding molecules of the present invention, and compositions thereof, are useful for the elimination of populations of specific cell types within the presence of untargeted cells or “bystander” cells. For example, the cytotoxic, multivalent CD20-binding molecules of the invention, and compositions thereof, are useful for the treatment of certain tumors, cancers, and/or growth abnormalities by eliminating CD20-expressing cells that express elevated levels of CD20 at one or more cellular surfaces. By targeting the delivery of enzymatically active Shiga toxin regions using multiple, high-affinity CD20 binding regions to CD20 expressing cells, Shiga toxin cell-kill activity can be restricted to preferentially killing CD20-expressing cell types that express CD20 at a cellular surface (e.g. CD20+ cells), such as, e.g., certain neoplastic or malignant plasma cells, in the presence of two or more cell types where at least one cell type population expresses more CD20 than at least one other cell type population.

[0281] In certain embodiments, the cytotoxic CD20-binding molecule of the present invention is capable of selectively or preferentially causing the death of a specific cell type within a mixture of two or more different cell types. This enables the targeted cytotoxic activity to specific cell types with a high preferentially, such as a 3-fold cytotoxic effect, over “bystander” cell types that do not express extracellular CD20.

[0282] In certain embodiments, administration of the multivalent CD20-binding molecule of the present invention to a mixture of cell types, the multivalent CD20-binding molecule is capable of selectively killing CD20-expressing cells displaying an extracellular CD20 target compared to cell types lacking extracellular CD20 target(s) of the binding region(s) of the multivalent CD20-binding molecule.

[0283] In certain embodiments, upon administration of the cytotoxic multivalent CD20-binding molecule of the present invention to a mixture of cell types, the cytotoxic multivalent CD20-binding molecule is capable of selectively killing CD20+ cells expressing an extracellular CD20 target biomolecule compared to cells lacking any cell-surface expression of extracellular CD20 target biomolecules.

[0284] Certain CD20 positive, cell types may be killed by a multivalent CD20-binding molecule of the present invention, or compositions thereof, in the presence of other cells, including other CD20 positive cells, based on different levels of extracellular CD20 target expression among the target cells and non-target cells. For example, cells which overexpress CD20 may be killed among healthy cells, whether the healthy cells are expressing CD20 or not.

[0285] A cell which “overexpresses” a target biomolecule includes a cell which has significantly higher levels of the target biomolecule physically coupled at its cell surface compared to a healthy cell of the same tissue type. Overexpression may be caused by a variety of circumstances, such as, e.g., gene amplification, increased transcription, increased translation, reduced CD20 shedding, and/or reduced removal of the CD20 target biomolecule. The skilled worker may determine overexpression of a particular target biomolecule using methods known in the art.

[0286] Levels of extracellular CD20 target biomolecules on the surface of cells may be determined using various methods known to the skilled worker, such as, e.g., FACS methods. As used herein, a significant amount of an extracellular CD20 expressed at a cellular surface is greater than 10,000, 20,000, 30,000, 40,000, or 50,000 mean fluorescence intensity (MFI) by FACS analysis depending on the cell type.

[0287] The cytotoxic multivalent CD20-binding molecules of the present invention are useful for reducing or eliminating populations of a specific cell type(s). For example, the cytotoxic multivalent CD20-binding molecules of the present invention are useful for the treatment of certain tumors, cancers, and/or growth abnormalities by eliminating CD20+ cells that express elevated levels of CD20 at one or more cellular surfaces (e.g. cells characterized as overexpressing CD20).

[0288] In certain embodiments, the multivalent CD20-binding molecule of the present invention may be used to target cytotoxic activity to specific cell types with a high preferentially, such as with at least a 3-fold cytotoxic effect, over “bystander” cell types that are CD20+ but express cell-surface CD20 at lower cell surface amounts or densities than target cells. The expression of CD20 may be non-exclusive to one cell type if extracellular CD20 is expressed in low enough amounts by cell types that are not to be targeted. Thus, preferential killing of one CD20 positive cell type may be accomplished in mixtures of multiple CD20+ where some CD20+ cell types are bystander cells, such as mixtures of CD20+ cell types with varying CD20 expression levels, optionally in the presence of CD20 negative cells as well. This enables the preferential cell-killing of high-expressing CD20 cell types, such as a 3-fold cytotoxic effect, over “bystander” cell types that do not express significant amounts of CD20 or do not expose significant amounts of an extracellular CD20 target of at least one of the CD20 binding regions of the cytotoxic multivalent CD20-binding molecules.

[0289] In certain embodiments, the cytotoxic activity of a multivalent CD20-binding molecule of the present invention toward populations of cell types physically coupled with an extracellular CD20 target is at least 3-fold higher than the cytotoxic activity toward populations of cell types not physically coupled with significant amounts of an extracellular CD20 target bound specifically by at least one of the CD20 binding regions of that multivalent CD20-binding molecule. According to the present invention, selective cytotoxicity may be quantified in terms of the ratio (a/b) of (a) cytotoxicity towards a population of cells physically coupled with a significant amount of an extracellular CD20 target of at least one of the CD20 binding regions of the multivalent CD20-binding molecule of the invention to (b) cytotoxicity towards a population of cells of a cell type not physically coupled with a significant amount of an extracellular CD20 target of at least one of the CD20 binding regions of the multivalent CD20-binding molecule of the invention.

[0290] In certain embodiments, the cytotoxicity ratio is indicative of the selective cytotoxicity which is at least 3-fold, 5-fold, 10-fold, 15-fold, 20-fold, 25-fold, 30-fold, 40-fold, 50-fold, 75-fold, 100-fold, 250-fold, 500-fold, 750-fold, 1000-fold or higher for populations of cells or cell types expressing or physically coupled with an extracellular CD20 target of at least one of the CD20 binding regions of the multivalent CD20-binding molecule of the present invention compared to populations of cells or cell types which do not express an extracellular CD20 target or that are not physically coupled with significant amounts of an extracellular CD20 target bound specifically by at least one of the CD20 binding regions of the multivalent CD20-binding molecule of the present invention. For example, upon administration of certain multivalent CD20-binding molecule of the present invention to two different populations of cells which differ with respect to the presence and/or polypeptide sequence of extracellular CD20 target biomolecule, the multivalent CD20-binding molecule is capable of causing cell death to the cell type(s) physically coupled with an extracellular CD20 target biomolecule bound by at least one of the multivalent CD20-binding molecule's CD20 binding regions, e.g., at a CD₅₀ at least three times less than the CD₅₀ of binding to cell types that are not physically coupled with an extracellular CD20 target of the multivalent CD20-binding molecule's CD20 binding region.

[0291] In certain embodiments of the multivalent CD20-binding molecules of the present invention, upon administration of the multivalent CD20-binding molecule to two different populations of cell types, the multivalent CD20-binding molecule is capable of causing cell death as defined by the half-maximal cytotoxic concentration (CD₅₀) to a first cell population, whose members express CD20 at a cellular surface, at a dose at least three-times lower than the CD₅₀ dose of the same multivalent CD20-binding molecule to a second population of cells whose members do not express CD20, do not express a significant amount of CD20, or are not exposing a significant amount of an extracellular CD20 target of at least one of the CD20 binding regions of the multivalent CD20-binding molecule.

[0292] According to the present invention, selective cytotoxicity may be quantified in terms of the ratio (a/b) of (a) cytotoxicity towards a population of CD20+ cells to (b) cytotoxicity towards a population of CD20 negative cells. In certain embodiments, the cytotoxicity ratio is indicative of selective cytotoxicity which is at least 3-fold, 5-fold, 10-fold, 15-fold, 20-fold, 25-fold, 30-fold, 40-fold, 50-fold, 75-fold, 100-fold, 250-fold, 500-fold, 750-fold, or 1000-fold higher for populations of CD20+ cells or CD20+ cell populations compared to CD20− cells or CD20− cell populations. For example, administration of certain embodiments of the multivalent CD20-binding molecule to two different populations of cell types with respect to the presence of an extracellular CD20 target biomolecule, the multivalent CD20-binding molecule is capable of causing cell death to the CD20 target biomolecule positive cells at a CD₅₀ at least three times less than the CD₅₀ to CD20 target biomolecule negative cells.

[0293] Particular CD20 expression levels within an organism may be limited to unique cells, tissues, cell types, conditions, disease states, disorders, and/or cellular contexts. CD20 may be overexpressed by cells involved in many disease states, such as, e.g., by malignant immune cells, tumor cells, and cancer cells.

[0294] In certain embodiments, administration of the multivalent CD20-binding molecule composition of the present invention to a mixture of cell types, the multivalent CD20-binding molecule composition is capable of selectively killing CD20-expressing cells displaying an extracellular CD20 target compared to cell types lacking an extracellular CD20 target(s) of the multivalent CD20-binding molecule of the composition of the invention.

[0295] In certain further embodiments, administration of the multivalent CD20-binding molecule composition of the present invention to two populations of cell types which differ in the presence and/or polypeptide sequence of a extracellular CD20 target, the multivalent CD20-binding molecule composition is capable of causing cell death as defined by the half-maximal cytotoxic concentration (CD₅₀) to a population of CD20+ target cells, e.g., at a dose at least three times lower than the CD₅₀ dose of the same multivalent CD20-binding molecule composition to a CD20-cell population.

[0296] According to the present invention, selective cytotoxicity may be quantified in terms of the ratio (a/b) of (a) cytotoxicity towards a population of CD20+ cells to (b) cytotoxicity towards a population of CD20− cells. In certain embodiments, the cytotoxicity ratio is indicative of selective cytotoxicity which is at least 3-fold, 5-fold, 10-fold, 15-fold, 20-fold, 25-fold, 30-fold, 40-fold, 50-fold, 75-fold, 100-fold, 250-fold, 500-fold, 750-fold, or 1000-fold higher for populations of CD20+ cells or CD20+ cell populations compared to CD20− cells or CD20− cell populations. For example, administration of certain embodiments of the multivalent CD20-binding molecule composition of the present invention to two different populations of cell types with respect to the presence of an extracellular CD20 target biomolecule, the multivalent CD20-binding molecule compositions are capable of causing cell death to the CD20 target biomolecule positive cells at a CD₅₀ at least three times less than the CD₅₀ to CD20 target biomolecule negative cells.

[0297] In certain embodiments, the multivalent CD20-binding molecule compositions of the present invention are capable of selectively or preferentially causing the death of a specific cell type within a mixture of two or more different cell types. This enables targeting cytotoxic activity to specific cell types with a high preferentially, such as with at least a 3-fold cytotoxic effect, over “bystander” cell types that do not express any significant amount of the appropriate extracellular CD20 target(s), such as, e.g., CD20 negative cells. This enables the targeted cell-killing of specific cell types expressing CD20 on cellular surfaces with a high preferentially, such as with at least a 3-fold cytotoxic effect, over “bystander” cell types that do not express significant amounts of the appropriate CD20 target(s) or are not exposing significant amounts of the appropriate CD20 target at a cellular surface.

[0298] Levels of extracellular CD20 expressed on the surface of a cell or cell population may be determined using various methods known to the skilled worker, such as, e.g., FACS methods. As used herein, a significant amount of an extracellular CD20 expressed at a cellular surface is greater than 10,000, 20,000, 30,000, 40,000, or 50,000 mean fluorescence intensity (MFI) by FACS analysis depending on the cell type.

[0299] Alternatively, certain multivalent CD20-binding molecules of the present invention, and compositions thereof, enable targeting cytotoxic activity to specific cell types with a high preferentially, such as with at least a 3-fold cytotoxic effect, over “bystander” cell types that are CD20+ but express CD20 at lower cell surface amounts or densities than target cells. Thus, preferential killing of one CD20 positive cell type may be accomplished in mixtures of multiple CD20+ cell types where some CD20+ cell types are bystander cells, such as mixtures of CD20+ cell types with varying CD20 expression levels, and optionally in the presence of CD20 negative cells as well.

[0300] In certain embodiments, the cytotoxic activity toward populations of cell types physically coupled with an extracellular CD20 target is at least 3-fold higher than the cytotoxic activity toward populations of cell types not physically coupled with significant amounts of extracellular CD20 target(s) of at least one of the CD20 binding regions of the cytotoxic, multivalent CD20-binding molecule of the present invention. According to the present invention, selective cytotoxicity may be quantified in terms of the ratio (a/b) of (a) cytotoxicity towards a population of cells physically coupled with a significant amount of an extracellular CD20 target of at least one of the CD20 binding regions of the cytotoxic, multivalent CD20-binding molecule to (b) cytotoxicity towards a population of cells of a cell type not physically coupled with a significant amount of an extracellular CD20 target of at least one of the CD20 binding regions of the cytotoxic, multivalent CD20-binding molecule. In certain embodiments, the cytotoxicity ratio is indicative of selective cytotoxicity which is at least 3-fold, 5-fold, 10-fold, 15-fold, 20-fold, 25-fold, 30-fold, 40-fold, 50-fold, 75-fold, 100-fold, 250-fold, 500-fold, 750-fold, or 1000-fold higher for populations of cells or cell types expressing an extracellular CD20 target or physically coupled with an extracellular CD20 target of at least one of the CD20 binding regions of the cytotoxic, multivalent CD20-binding molecule compared to populations of cells or cell types which do not express an extracellular CD20 target or are not physically coupled with significant amounts of an extracellular CD20 target of at least one of the CD20 binding regions of the cytotoxic, multivalent CD20-binding molecule. For example, administration of certain embodiments of the multivalent CD20-binding molecule composition of the present invention to two different populations of cell types with respect to the presence of an extracellular CD20 target biomolecule, the multivalent CD20-binding molecule composition is capable of causing cell death to the cell type(s) physically coupled with an extracellular CD20 target biomolecule of one or more of its CD20 binding regions at a CD₅₀ at least three times less than the CD₅₀ to cell types which are not physically coupled with an extracellular CD20 target of its CD20 binding region.

[0301] In certain embodiments of the multivalent CD20-binding molecule composition of the present invention, administration of the multivalent CD20-binding molecule composition to two different populations of cell types, the multivalent CD20-binding molecule composition is capable of causing cell death as defined by the half-maximal cytotoxic concentration (CD₅₀) to a first cell population, whose members express CD20 at a cellular surface, at a dose at least three-times lower than the CD₅₀ dose of the same multivalent CD20-binding molecule compositions to a second population of cells whose members do not express CD20, do not express a significant amount of CD20, or are not exposing a significant amount of an extracellular CD20 target of at least one of the CD20 binding regions of the multivalent CD20-binding molecule composition.

[0302] In certain embodiments, the cytotoxic activity of a multivalent CD20-binding molecule composition of the present invention toward populations of cell types expressing CD20 at a cellular surface is at least 3-fold higher than the cytotoxic activity toward populations of cell types not physically coupled with any extracellular CD20 target bound specifically by a multivalent CD20-binding molecule of the multivalent CD20-binding molecule composition.

[0303] According to the present invention, selective cytotoxicity may be quantified in terms of the ratio (a/b) of (a) cytotoxicity towards a population of cells expressing an extracellular CD20 target of a CD20 binding region of the embodiment to (b) cytotoxicity towards a population of cells of a cell type not physically coupled with any extracellular CD20 target of a CD20 binding region of the embodiment. In certain embodiments, the cytotoxicity ratio is indicative of selective cytotoxicity which is at least 3-fold, 5-fold, 10-fold, 15-fold, 20-fold, 25-fold, 30-fold, 40-fold, 50-fold, 75-fold, 100-fold, 250-fold, 500-fold, 750-fold, or 1000-fold higher for populations of cells or cell types expressing CD20 compared to populations of cells or cell types which do not express CD20.

[0304] In certain embodiments, the cytotoxic activity of a multivalent CD20-binding molecule composition of the present invention toward populations of cell types physically coupled with an extracellular CD20 target is at least 3-fold higher than the cytotoxic activity toward populations of cell types not physically coupled with significant amounts of an extracellular CD20 target bound specifically by at least one of the CD20 binding regions of a multivalent CD20-binding molecule of the multivalent CD20-binding molecule composition. According to the present invention, selective cytotoxicity may be quantified in terms of the ratio (a/b) of (a) cytotoxicity towards a population of cells physically coupled with a significant amount of an extracellular CD20 target of at least one of the CD20 binding regions of a cytotoxic multivalent CD20-binding molecule of the present invention to (b) cytotoxicity towards a population of cells of a cell type not physically coupled with a significant amount of an extracellular CD20 target of at least one of the CD20 binding regions of the cytotoxic multivalent CD20-binding molecule. In certain embodiments, the cytotoxicity ratio is indicative of selective cytotoxicity which is at least 3-fold, 5-fold, 10-fold, 15-fold, 20-fold, 25-fold, 30-fold, 40-fold, 50-fold, 75-fold, 100-fold, 250-fold, 500-fold, 750-fold, 1000-fold or higher for populations of cells or cell types expressing an extracellular CD20 target or physically coupled with an extracellular CD20 target of at least one of the CD20 binding regions of a cytotoxic multivalent CD20-binding molecule of the composition of the invention compared to populations of cells or cell types which do not express an extracellular CD20 target or that are not physically coupled with significant amounts of an extracellular CD20 target bound specifically by any of the CD20 binding regions of the cytotoxic multivalent CD20-binding molecule of the composition of the invention. For example, upon administration of certain multivalent CD20-binding molecule compositions of the invention to two different populations of cells which differ with respect to the presence and/or polypeptide sequence of extracellular CD20 target biomolecule, the multivalent CD20-binding molecule compositions are capable of causing cell death to the cell type(s) physically coupled with an extracellular CD20 target biomolecule bound by at least one of the CD20 binding regions of a multivalent CD20-binding molecule of the composition, e.g., at a CD₅₀ at least three times less than the CD₅₀ of binding to cell types that are not physically coupled with an extracellular CD20 target of any of the multivalent CD20-binding molecules of the composition.

[0305] In certain embodiments of the multivalent CD20-binding molecule composition of the present invention, upon administration of the multivalent CD20-binding molecule composition to two different populations of cell types, the multivalent CD20-binding molecule composition is capable of causing cell death as defined by the half-maximal cytotoxic concentration (CD₅₀) to a first cell population, whose members express CD20 at a cellular surface, at a dose at least three-times lower than the CD₅₀ dose of the same multivalent CD20-binding molecule composition to a second population of cells whose members do not express CD20, do not express a significant amount of CD20, or are not exposing a significant amount of an extracellular CD20 target of at least one of the CD20 binding regions of any cytotoxic, multivalent CD20-binding molecule of the multivalent CD20-binding molecule composition.

[0306] This preferential cell-killing function allows a targeted CD20+ cell to be killed by certain multivalent CD20-binding molecules of the present invention, and compositions thereof, under varied conditions and in the presence of non-targeted CD20− bystander cells, such as ex vivo manipulated mixtures of cell types, in vitro cultured tissues with mixtures of cell types, or in vivo in the presence of multiple cell types (e.g. in situ, in a native location within a multicellular organism, or at disease locus within a multicellular organism).

[0307] In certain embodiments, upon administration of the multivalent CD20-binding molecule of the present invention, and/or composition thereof, to a mixture of cell types, the multivalent CD20-binding molecule, and/or composition thereof, is capable of selectively killing CD20+ cells expressing an extracellular CD20 target biomolecule compared to cells lacking any cell-surface expression of extracellular CD20 target biomolecules. By targeting the delivery of enzymatically active Shiga toxin regions to specific cell types using high-affinity CD20 binding regions, this potent and selective cell-kill activity can be restricted to killing only CD20 expressing cells within in an organism.

[0308] In certain embodiments of the invention, the multivalent CD20-binding molecules of the present invention, and compositions thereof, have applications in killing CD20+ cells in a disease, disorder or condition involving cells with abnormally high CD20 expression and/or ectopic CD20 expression. Various types of cells which express CD20 may be targeted by the multivalent CD20-binding molecules of the present invention, and compositions thereof, for cell killing and/or cytostasis. For example, there are various types of CD20+ cells which function in various biological processes including autoimmune conditions, neoplastic B-cell proliferation, and hypersensitivity responses.

C. Delivery of an Additional, Exogenous Material into the Interior of a Target Cell

[0309] In addition to direct cell killing, multivalent CD20-binding molecules of the present invention, and compositions thereof, optionally may be used for delivery of additional exogenous materials into the interiors of target cells. The delivery of additional exogenous materials may be used, e.g., for cytotoxic, cytostatic, information gathering, and/or diagnostic functions. Nontoxic and reduced-cytotoxic variants of the cytotoxic, multivalent CD20-binding molecules of the present invention, or optionally toxic variants, may be used to deliver additional exogenous materials to and/or label the interiors of cells physically coupled with an extracellular CD20 molecule.

[0310] For example, certain embodiments of the multivalent CD20-binding molecules of the present invention do not exhibit a significant level of Shiga toxin based cytotoxicity, such as, e.g., no significant cell death is observed at concentrations of a multivalent CD20-binding molecule of the present invention of less than 1,000 nM, 500 nM, 100 nM, 75 nM, 50 nM in an in vitro cell culture, cell-kill assay. Similarly, at administration doses of 1-100 μg of a multivalent cell-targeting molecule of the present invention per kg of a mammalian recipient, there will be no observable toxicity. This system is modular, in that any number of diverse CD20-binding regions can be used to target a multivalent CD20-binding molecule of the present invention to various, diverse cell types, such as, e.g., cells of different mammalian species.

[0311] Various types of cells and/or cell populations which express CD20 at one or more cellular surfaces may be targeted by the multivalent, CD20-binding molecules of the present invention for receiving exogenous materials. The functional components of the present invention are modular in that various Shiga toxin effector regions and additional exogenous materials may be linked to various CD20 binding regions to create varied, multivalent CD20-binding molecules of the present invention that are suitable for use in diverse applications, such as non-invasive, in vivo imaging of tumor cells.

[0312] Because the multivalent CD20-binding molecules, whether cytotoxic, reduced-cytotoxic, or nontoxic, and catalytically inactive forms thereof, are capable of entering cells physically coupled with CD20 molecule, certain embodiments of the multivalent, CD20-binding molecules of the present invention may be used to deliver additional exogenous materials into the interior of targeted CD20+ cell types. In one sense, the entire multivalent CD20-binding molecule is an exogenous material which will enter the target cell; thus, the “additional” exogenous materials are heterologous materials linked to but other than the core, multivalent CD20-binding molecule itself, which is composed of merely of the minimum required components to achieve rapid cellular internalization and/or efficient sub-cellular routing to the desired intracellular compartment(s).

[0313] “Additional exogenous material” as used herein refers to one or more molecules, often not generally present within a native CD20+ target cell, where the multivalent CD20-binding molecules of the present invention can be used to specifically transport such material into the interior of a cell.

[0314] Non-limiting examples of additional exogenous materials are cytotoxic agents, peptides, polypeptides, proteins, polynucleotides, small molecule chemotherapeutic agents, radionuclides, and detection promoting agents.

[0315] Nontoxic variants and reduced cytotoxicity variants of the cytotoxic CD20-binding molecules of the present invention, and compositions thereof, or optionally toxic variants, may be used to deliver additional exogenous materials and/or label the interiors of cells physically coupled with CD20 molecules bound by the multivalent CD20-binding molecules of the present invention. Various types of cells and/or cell populations which express CD20 at a cellular surface may be targeted by the multivalent CD20-binding molecules of the present invention, and compositions thereof, for killing and/or receiving exogenous materials, such as detection promoting agents. The system of the present invention is modular, in that various Shiga toxin effector regions and additional exogenous materials may be linked to the same binding region to provide diverse applications, such as, e.g., non-invasive in vivo imaging of the interiors of tumor cells and/or immune cells.

[0316] In certain embodiments of the multivalent CD20-binding molecules of the present invention, and compositions thereof, for use in delivery of additional exogenous materials into the interior of a cell, the additional exogenous material is a cytotoxic agent, such as, e.g., a small molecule chemotherapeutic agent, cytotoxic antibiotic, alkylating agent, antimetabolite, topoisomerase inhibitor, and/or tubulin inhibitor. Non-limiting examples of cytotoxic agents include aziridines, cisplatins, tetrazines, procarbazine, hexamethylmelamine, vinca alkaloids, taxanes, camptothecins, etoposide, doxorubicin, mitoxantrone, teniposide, novobiocin, aclarubicin, anthracyclines, actinomycin, bleomycin, plicamycin, mitomycin, daunorubicin, epirubicin, idarubicin, dolastatins, maytansines, docetaxel, adriamycin, calicheamicin, auristatins, pyrrolobenzodiazepine, carboplatin, 5-fluorouracil (5-FU), capecitabine, mitomycin C, paclitaxel, 1,3-Bis(2-chloroethyl)-1-nitrosourea (BCNU), rifampicin, cisplatin, methotrexate, and gemcitabine.

[0317] In certain embodiments, the additional exogenous material comprises a protein or polypeptide comprising an enzyme. In certain other embodiments, the additional exogenous material is a nucleic acid, such as, e.g. a ribonucleic acid that functions as a small inhibiting RNA (siRNA) or microRNA (miRNA). In certain embodiments, the additional exogenous material is an antigen, such as antigens derived from bacterial proteins, viral proteins, proteins mutated in cancer, proteins aberrantly expressed in cancer, or T-cell complementary determining regions. For example, exogenous materials include antigens, such as those characteristic of antigen-presenting cells infected by bacteria, and T-cell complementary determining regions capable of functioning as exogenous antigens. In certain embodiments, the additional exogenous material comprises a proapoptotic peptide, polypeptide, or protein, such as, e.g., BCL-2, caspases, cytochromes, granzyme B, apoptosis-inducing factor (AIF), BAX, tBid (truncated Bid), and proapoptotic fragments or derivatives thereof (see e.g. Ellerby H et al., Nat Med 5: 1032-8 (1999); Mai J et al., Cancer Res 61: 7709-12 (2001); Liu Y et al., Mol Cancer Ther 2: 1341-50 (2003); Perea S et al., Cancer Res 64: 7127-9 (2004); Dälken B et al., Cell Death Differ 13: 576-85 (2006); Kwon M et al., Mol Cancer Ther 7: 1514-22 (2008); Wang F et al., Clin Cancer Res 16: 2284-94 (2010); Kim J et al., J Virol 85: 1507-16 (2011)). Additional examples of exogenous materials include proteins larger than an antigenic peptide, such as enzymes. Exogenous materials comprising a protein may optionally comprise one or more antigens whether known or unknown to the skilled worker.

[0318] In certain embodiments of the multivalent CD20-binding molecules of the present invention, and compositions thereof, for use in delivery of additional exogenous materials into the interior of a cell, the additional exogenous material is one or more radionucleides, such as, e.g., ²¹¹At, ¹³¹I, ¹²⁵I, ⁹⁰Y, ¹¹¹In, ¹⁸⁶Re, ¹⁸⁸Re, ¹⁵³Sm, ²¹²Bi, ³²P, ⁶⁰C, and/or radioactive isotopes of Lu.

[0319] In certain embodiments, the multivalent CD20-binding molecule of the present invention comprises an additional exogenous material for delivery into a cell, and the multivalent CD20-binding molecule comprises the protein shown in any one of SEQ ID NOs: 51-52, 59-61, 64-65, 71-73, 76-77, 82-83, 88-89, 94, 100, 106, 109-112, 115-118, 124, 132, 140, 145, 150, 156, 162, 168, 171, 174, 180-181, 189-190, 193-194, 200-202, 205-206, 211-212, 217-218, 223, 229, 235, 238-241, 244-247, 253, 261, 269, 274, 279, and 285; and optionally, the protein further comprises an amino-terminal methionine residue. In certain further embodiments, the multivalent CD20-binding molecule of the present invention comprises or consists essentially of two proteins, each protein selected from any one of the polypeptides shown in SEQ ID NOs: 51-52, 59-61, 64-65, 71-73, 76-77, 82-83, 88-89, 94, 100, 106, 109-112, 115-118, 124, 132, 140, 145, 150, 156, 162, 168, 171, 174, 180-181, 189-190, 193-194, 200-202, 205-206, 211-212, 217-218, 223, 229, 235, 238-241, 244-247, 253, 261, 269, 274, 279, and 285; and optionally, each protein further comprises an amino-terminal methionine residue. In certain further embodiments, the protein is selected from any one of the proteins shown in SEQ ID NOs: 51-52, 59-61, 64-65, 71-73, 76-77, 82-83, 88-89, 94, 100, 106, 109-112, 115-118, 124, 132, 140, 145, 150, 156, 162, 168, 171, and 174, and further comprises a disulfide bond involving a cysteine residue at the position selected from the group consisting of: 242, 482, 483, 484, 490, 491, 492, 493, 494, 495, 499, 500, 501, 502, 503, 504, 505, 510, 511, 512, 513, and 521.

[0320] For certain embodiments, upon administration of the multivalent CD20-binding molecule, and/or a composition thereof, to one or more cells physically coupled with CD20, which have the extracellular part bound by the two or more CD20 binding regions of the multivalent CD20-binding molecule, the multivalent CD20-binding molecule internalizes into one or more of the cells and delivers an additional exogenous material into the interior of the cell(s) or at least some of the cells.

[0321] For certain embodiments of the multivalent CD20-binding molecule of the present invention and compositions thereof, a cellular internalization rate may be measured as the time after administration (on average) at which the multivalent CD20-binding molecule of the present invention is observed inside a cell(s) and/or a majority of the cells contacted with the multivalent CD20-binding molecule and/or composition thereof. For example, the anti-CD20 monoclonal antibody rituximab typically reaches maximal cellular internalization at 37° C. after approximately 16 to 18 hours, and thus, in the context of the present invention, a “rapid internalization” would indicate internalization rate several hours faster than that observed for rituximab, on average at the same temperature and receptor occupancy level.

[0322] For certain embodiments, upon administration of the multivalent CD20-binding molecule, and/or a composition thereof, to one or more cells physically coupled with CD20, which have the extracellular part bound by the two or more CD20 binding regions of the multivalent CD20-binding molecule, the multivalent CD20-binding molecule internalizes into one or more of the cells and delivers an additional exogenous material into the interior of the cell in about five hours, four hours, three hours, two hours, one hour, thirty minutes, or less at a physiological temperature appropriate for the cell and/or at about 37 degrees Celsius. For certain further embodiments, the cell(s) expresses at a cellular surface the CD20 which (1) have the extracellular part bound by the two or more CD20 binding regions of the multivalent CD20-binding molecule, (2) have a transmembrane domain, and (3) remain physically coupled to the cell. For certain further embodiments, the cell(s) is a CD20 positive cell. For certain embodiments, the cell(s) is physically coupled with a significant amount of extracellular CD20 which (1) have the extracellular part bound by the two or more CD20 binding regions of the multivalent CD20-binding molecule. For certain embodiments, the cell(s) is a descendant or member of a B-cell lineage. For certain embodiments, the cell(s) is selected from the group consisting of: malignant B-cell, B-cell leukemia cell, B-cell lymphoma cell, B-cell myeloma cell, acute myeloid leukemia cell, acute non-lymphocytic leukemia cell, B-cell chronic lymphocytic leukemia cell, B-cell lymphoma cell, B-cell non-Hodgkin's lymphoma cell, B-cell precursor acute lymphoblastic leukemia cell, B-cell prolymphocytic leukemia cell, Burkitt's lymphoma cell, chronic lymphocytic leukemia cell, chronic myeloid leukemia cell, diffuse large B-cell lymphoma cell, follicular lymphoma cell, hairy cell leukemia cell, Hodgkin's lymphoma cell, immunoblastic large cell lymphoma cell, mantle cell lymphoma cell, melanoma cell, multiple myeloma cell, neoplastic plasma cell, nodular lymphocyte predominant Hodgkin's lymphoma cell, non-Hodgkin's lymphoma cell, plasmablastic lymphoma cell, plasma cell myeloma cell, precursor B-lymphoblastic lymphoma cell, small lymphocytic lymphoma cell, malignant T-cell, T-cell leukemia cell, T-cell lymphoma cell, T-cell large granular lymphocyte leukemia cell, T-cell prolymphocytic leukemia, healthy B-cell lineage cell, and/or healthy T-cell.

[0323] For purposes of certain embodiments of the present invention, the phrase “in less than about thirty minutes” means that the maximal (or half-maximal in certain contexts) observed amount of intracellular CD20, CD20 antigen, and/or multivalent CD20-binding molecule during a internalization assay time course is observed at or before thirty minutes from the step of contacting CD20 positive cell(s) with the multivalent CD20-binding molecule of the present invention as determined by an appropriate assay at conditions similar to 37° C. and 50 nM of multivalent CD20-binding molecule. The time of maximal or half-maximal intracellular accumulation may be determined by comparing intracellular accumulation at different times to find a peak or plateau. If a plateau is observed, then the maximal intracellular accumulation may be determined to be the first time the plateau reaches its highest point.

[0324] The extracellular CD20 cell surface density and the K_{D} of a CD20-binding molecule may be used to calculate the percent occupancy for a given concentration of CD20-binding molecule, such as a CD20-binding molecule of the present invention or a reference CD20-binding molecule (e.g. monoclonal antibody) known to the skilled worker. For example, the CD20 receptor occupancy may be determined as a function of the 1) binding interaction between the extracellular CD20 receptor and CD20-binding molecule, 2) amount (e.g., concentration or effective concentration) of extracellular CD20 receptor available for binding, and 3) the amount (e.g., mass, concentration, or molarity) of CD20-binding molecule present in a given situation.

[0325] In certain embodiments, internalization rates of a multivalent CD20-binding molecule of the present invention compared to a CD20 antibody known in the art may be determined using assays performed at comparable extracellular CD20 receptor occupancies, instead of being determined using assays performed at comparable concentrations of the administered CD20-binding molecules (i.e. a multivalent CD20-binding molecule of the present invention and a reference, anti-CD20 antibody of prior art). The percent CD20 receptor occupancy (RO_{CD20}) may be determined using models and formulae, such as, e.g.,

$${RO}_{CD 20} = \frac{\begin{matrix}{K}_{D} + {A}_{tot} + CD {20}_{tot} - \\ \sqrt{{( - {K}_{D} - {A}_{tot} - CD {20}_{tot} )}^{2} - 4 \cdot {A}_{tot} \cdot CD {20}_{tot}}\end{matrix}}{2 \cdot CD {20}_{tot}}$$

where RO is the receptor occupancy of the extracellular CD20 in the internalization assay, K_{D} is the dissociation constant of the CD20 binding molecule of interest to the extracellular CD20 receptor, Aₜₒₜ is the total number of CD20 binding molecules in the assay, and CD20ₜₒₜ is the total number of cell surface CD20 molecules in the assay (see e.g. Muller P, Brennan F, Clin Pharmacol Ther 85: 247-58 (2009); U.S. Ser. No. 14/965,882).

[0326] For certain embodiments of the multivalent CD20-binding molecule of the present invention, which comprises an additional exogenous material; whereby upon administration of the multivalent CD20-binding molecule, or a composition thereof, to a plurality of cells physically coupled with CD20, which have the extracellular part bound by the two or more CD20 binding regions of the multivalent CD20-binding molecule, at a concentration of multivalent CD20-binding molecule equivalent to five or thirty-eight percent to fifty percent cell-surface occupancy, the majority of the multivalent CD20-binding molecule internalizes into the plurality of cells and delivers the additional exogenous material into the interiors of the majority of the plurality of cells in about five hours, four hours, three hours, two hours, one hour, thirty minutes, or less at a physiological temperature appropriate for the cell and/or at about 37 degrees Celsius. For certain further embodiments, members of the plurality of cells express at a cellular surface the CD20 which (1) have the extracellular part bound by the two or more CD20 binding regions of the multivalent CD20-binding molecule, (2) have a transmembrane domain, and (3) remain physically coupled to the cell. For certain further embodiments, members of the plurality of cells are CD20 positive cells. For certain embodiments, the members of the plurality of cells are physically coupled with a significant amount of extracellular CD20 which (1) have the extracellular part bound by the two or more CD20 binding regions of the multivalent CD20-binding molecule. For certain embodiments, members of the plurality of cells are descendants or members of a B-cell lineage. For certain embodiments, members of the plurality of cells are selected from the group consisting of: malignant B-cell, B-cell leukemia cell, B-cell lymphoma cell, B-cell myeloma cell, acute myeloid leukemia cell, acute non-lymphocytic leukemia cell, B-cell chronic lymphocytic leukemia cell, B-cell lymphoma cell, B-cell non-Hodgkin's lymphoma cell, B-cell precursor acute lymphoblastic leukemia cell, B-cell prolymphocytic leukemia cell, Burkitt's lymphoma cell, chronic lymphocytic leukemia cell, chronic myeloid leukemia cell, diffuse large B-cell lymphoma cell, follicular lymphoma cell, hairy cell leukemia cell, Hodgkin's lymphoma cell, immunoblastic large cell lymphoma cell, mantle cell lymphoma cell, melanoma cell, multiple myeloma cell, neoplastic plasma cell, nodular lymphocyte predominant Hodgkin's lymphoma cell, non-Hodgkin's lymphoma cell, plasmablastic lymphoma cell, plasma cell myeloma cell, precursor B-lymphoblastic lymphoma cell, small lymphocytic lymphoma cell, malignant T-cell, T-cell leukemia cell, T-cell lymphoma cell, T-cell large granular lymphocyte leukemia cell, T-cell prolymphocytic leukemia, healthy B-cell lineage cell, and/or healthy T-cell.

[0327] Because certain multivalent CD20-binding molecules of the present invention, and compositions thereof, exhibit specific cell-targeting and efficient cellular internalization (e.g. within thirty minutes after administration), a cytotoxic cargo (such as, e.g., a cytotoxic agent, ribonucleic acid, antigen, and/or proapoptotic peptide) conjugated to a multivalent CD20-binding molecule of the present invention can be efficiently delivered into a CD20-expressing cell for the purpose of killing the cell. Because certain multivalent CD20-binding molecules of the present invention, and compositions thereof, exhibit selective cell-targeting and efficient cellular internalization (e.g. within thirty minutes after administration), a cytotoxic cargo (such as, e.g., a cytotoxic agent, ribonucleic acid, antigen, and/or proapoptotic peptide) conjugated to a multivalent CD20-binding molecule of the present invention can be selectively and efficiently delivered into a CD20-expressing cell for the purpose of killing the cell in the presence of other cells, including other CD20-expressing cells which express lower levels of CD20 than the targeted cell(s).

### D. Information Gathering for Diagnostic Functions

[0328] Certain multivalent CD20-binding molecules of the present invention, and compositions thereof, have uses in the in vitro and/or in vivo detection of specific cells, cell types, cell populations, and/or subcellular compartments of any of the foregoing. In certain embodiments, the multivalent CD20-binding molecules of the present invention, and compositions thereof, are used for both diagnosis and treatment, or for diagnosis alone. When the same cytotoxic, multivalent CD20-binding molecule is used for both diagnosis and treatment, the cytotoxic, multivalent CD20-binding molecule variant which incorporates a detection promoting agent for diagnosis may be rendered nontoxic or to exhibit reduced cytotoxicity by catalytic inactivation of its Shiga toxin effector region(s) via one or more amino acid substitutions, such as, e.g., exemplary substitutions described herein, e.g. such that at a given dose (e.g., less than 1 mg/kg) there is no observable reduction in a CD20 target positive cell. Reduced-cytotoxic variants may still be cytotoxic at certain concentrations or dosages but exhibit reduced cytotoxicity, such as, e.g., are not capable of exhibiting a significant level of Shiga toxin cytotoxicity in a given in vitro cell-kill assay. Nontoxic or reduced-cytotoxic forms of the cytotoxic, multivalent CD20-binding molecules of the invention that are conjugated to detection promoting agents optionally may be used for diagnostic functions, such as for companion diagnostics used in conjunction with a therapeutic regimen comprising the same or a related CD20 binding region for cell-targeting and/or involving the same or a related CD20 epitope for targeted therapy.

[0329] The ability to conjugate detection promoting agents known in the art to various cytotoxic multivalent CD20-binding molecules of the present invention provides useful compositions for the detection of cancer, tumor, and immune cells, as well as subcellular compartments of the foregoing. These diagnostic embodiments of the multivalent, CD20-binding molecules of the present invention, and compositions thereof, may be used for information gathering via various imaging techniques and assays known in the art. For example, diagnostic embodiments of the multivalent CD20-binding molecules of the present invention may be used for information gathering via imaging of intracellular organelles (e.g. endocytotic, Golgi, endoplasmic reticulum, and cytosolic compartments) of individual cancer cells, neoplastic cells, malignant tumor cells, non-malignant tumor cells, immune cells, and/or hematological cells in a patient or biopsy sample.

[0330] Various types of information may be gathered using the diagnostic embodiments of the multivalent CD20-binding molecules of the present invention, and compositions thereof, whether for diagnostic uses or other uses. This information may be useful, for example, in diagnosing CD20 positive, neoplastic cell types; determining therapeutic susceptibilities of a patient's disease; assaying the progression of anti-neoplastic therapies over time; assaying the progression of immunomodulatory therapies over time; assaying the progression of antimicrobial therapies over time; evaluating the presence of unwanted CD20+ cell types in transplantation materials; and/or evaluating the presence of residual tumor cells after surgical excision of a tumor mass.

[0331] For example, subpopulations of patients might be ascertained using information gathered using the diagnostic variants of the multivalent CD20-binding molecules of the present invention, and compositions thereof, and then individual patients could be further categorized into subpopulations based on their unique characteristic(s) revealed using those diagnostic embodiments. For example, the effectiveness of specific pharmaceuticals or therapies might be one type of criterion used to define a patient subpopulation. For example, a nontoxic diagnostic variant of a particular cytotoxic, multivalent CD20-binding molecule of the present invention, and/or composition thereof, may be used to differentiate which patients are in a class or subpopulation of patients predicted to respond positively to a cytotoxic variant of the same cytotoxic, multivalent CD20-binding molecule or other, related, therapeutic molecule. Accordingly, associated methods for patient identification, patient stratification and diagnosis using cytotoxic, multivalent CD20-binding molecules and their nontoxic or reduced-cytotoxic variants, as well as compositions thereof, are considered to be within the scope of the present invention.

### IV. Variations in Proteinaceous Components of the Multivalent CD20-Binding Molecules of the Present Invention

[0332] The skilled worker will recognize that variations may be made to the multivalent CD20-binding molecules of the present invention (and polynucleotides encoding them and/or their components) without diminishing their biological activities, e.g., by maintaining the overall structure and function of a given multivalent CD20-binding molecule. For example, some modifications may facilitate expression, facilitate purification, improve pharmacokinetic properties, improve protein stability, and/or improve immunogenicity. Such modifications are well known to the skilled worker and include, for example, a methionine added at the amino terminus to provide an initiation site, additional amino acids placed on either terminus to create conveniently located restriction sites or termination codons, and biochemical affinity tags fused to either terminus to provide for convenient detection and/or purification. A common modification to improve the immunogenicity of a polypeptide is to remove, after the production of the polypeptide, the starting methionine residue, which may be formylated during production in a bacterial host system, because, e.g., the presence of amino-terminal formylmethionine (fMet) might induce undesirable immune responses in chordates.

[0333] In certain embodiments, the multivalent CD20-binding molecule of the present invention is PEGylated, such as, e.g., to improve pharmacokinetic properties, to improve immunogenicity, and/or provide other benefit(s) (see e.g. Wang Q et al., Cancer Res 53: 4588-94 (1993); Tsutsumi Y et al., Proc Natl Acad Sci USA 97: 8548-53 (2000); Buse J, El-Aneed A, Nanomed 5: 1237-60 (2010)).

[0334] Also contemplated herein is the inclusion of additional amino acid residues at the amino and/or carboxy termini, such as sequences for epitope tags or other moieties. The additional amino acid residues may be used for various purposes including, e.g., to facilitate cloning, expression, post-translational modification, synthesis, purification, detection, and/or administration. Non-limiting examples of epitope tags and moieties are: chitin binding protein domains, enteropeptidase cleavage sites, Factor Xa cleavage sites, FIAsH tags, FLAG tags, green fluorescent proteins (GFP), glutathione-S-transferase moieties, HA tags, maltose binding protein domains, myc tags, polyhistidine tags, ReAsH tags, strep-tags, strep-tag II, TEV protease sites, thioredoxin domains, thrombin cleavage site, and V5 epitope tags.

[0335] In certain of the above embodiments, the multivalent CD20-binding molecule of the present invention is a variant in which there are one or more conservative amino acid substitutions introduced into a proteinaceous region(s). As used herein, the term “conservative substitution” denotes that one or more amino acids are replaced by another, biologically similar amino acid residue. Examples include substitution of amino acid residues with similar characteristics, e.g. small amino acids, acidic amino acids, polar amino acids, basic amino acids, hydrophobic amino acids and aromatic amino acids (see, for example, Table B below). An example of a conservative substitution with a residue normally not found in endogenous, mammalian peptides and proteins is the conservative substitution of an arginine or lysine residue with, for example, ornithine, canavanine, aminoethylcysteine, or another basic amino acid. For further information concerning phenotypically silent substitutions in peptides and proteins see, e.g., Bowie J et al., Science 247: 1306-10 (1990).

TABLE B
Examples of Conservative Amino Acid Substitutions

| I | II | III | IV | V | VI | VII | VIII | IX | X | XI | XII | XIII | XIV |
|---|---|---|---|---|---|---|---|---|---|---|---|---|---|
| A | D | H | C | F | N | A | C | F | A | C | A | A | D |
| G | E | K | I | W | Q | G | M | H | C | D | C | C | E |
| P | Q | R | L | Y | S | I | P | W | F | E | D | D | G |
| S | N | | M | | T | L | | Y | G | H | G | E | K |
| T | | | V | | | V | | | H | K | N | G | P |
| | | | | | | | | | I | N | P | H | Q |
| | | | | | | | | | L | Q | S | K | R |
| | | | | | | | | | M | R | T | N | S |
| | | | | | | | | | R | S | V | Q | T |
| | | | | | | | | | T | T | | R | |
| | | | | | | | | | V | | | S | |
| | | | | | | | | | W | | | P | |
| | | | | | | | | | Y | | | T | |

[0336] In the conservative substitution scheme in Table B, exemplary conservative substitutions of amino acids are grouped by physicochemical properties—I: neutral, hydrophilic; II: acids and amides; III: basic; IV: hydrophobic; V: aromatic, bulky amino acids, VI hydrophilic uncharged, VII aliphatic uncharged, VIII non-polar uncharged, IX cycloalkenyl-associated, X hydrophobic, XI polar, XII small, XIII turn-permitting, and XIV flexible. For example, conservative amino acid substitutions include the following: 1) S may be substituted for C; 2) M or L may be substituted for F; 3) Y may be substituted for M; 4) Q or E may be substituted for K; 5) N or Q may be substituted for H; and 6) H may be substituted for N.

[0337] In certain embodiments, a multivalent CD20-binding molecule of the present invention or multivalent CD20-binding molecule composition of the present invention may comprise a protein that has, at most, 20, 15, 10, 9, 8, 7, 6, 5, 4, 3, 2, or 1 amino acid substitution(s) compared to a protein sequence recited herein, as long as the multivalent CD20-binding molecule retains the requisite biological activity(ies).

[0338] Variants of multivalent CD20-binding molecules provided herein are within the scope of the present invention as a result of changing a proteinaceous component of the multivalent CD20-binding molecule of the present invention by altering one or more amino acids or deleting or inserting one or more amino acids, such as, e.g., within a CD20 binding region or Shiga toxin effector region, in order to achieve desired properties, such as, e.g., changed cytotoxicity, changed cytostatic effects, changed immunogenicity, and/or changed serum half-life. A polypeptide component of a multivalent CD20-binding molecule of the present invention or multivalent CD20-binding molecule composition of the present invention may further be with or without a signal sequence. In certain embodiments, a proteinaceous component of a multivalent CD20-binding molecule of the present invention or multivalent CD20-binding molecule composition of the present invention shares at least 85%, 90%, 95%, 96%, 97%, 98%, 99% or more amino acid sequence identity to any one of the amino acid sequences of a molecule recited herein, as long as the proteinaceous component retains, alone and/or as a component of a multivalent CD20-binding molecule of the present invention, measurable biological activity, such as cytotoxicity, extracellular CD20 target biomolecule binding, enzymatic catalysis, or subcellular routing.

[0339] In certain embodiments, a proteinaceous component of a multivalent CD20-binding molecule of the present invention may comprise functional fragments or variants of a polypeptide region of the invention that have, at most, 20, 15, 10, 9, 8, 7, 6, 5, 4, 3, 2, or 1 amino acid substitution(s) compared to a polypeptide sequence recited herein, as long as the substituted protein retains measurable biological activity alone and/or as a component of a multivalent CD20-binding molecule of the present invention.

[0340] In certain embodiments, a proteinaceous component of a multivalent CD20-binding molecule of a composition of the present invention shares at least 85%, 90%, 95%, 96%, 97%, 98%, 99% or more amino acid sequence identity to any one of the amino acid sequences of a protein recited herein, as long as the protein retains measurable biological activity, such as cytotoxicity, extracellular CD20 target biomolecule binding, enzymatic catalysis, or subcellular routing. The CD20 binding regions of a multivalent CD20-binding molecule may differ from the amino acid sequences of a CD20 binding region recited herein, as long as the CD20-binding region retains binding functionality to an extracellular part of CD20. Binding functionality will most likely be retained if the amino acid sequences of the CDRs or ABRs are identical. For example, a multivalent CD20-binding molecule is within the claim scope wherein the CD20-binding region comprises one or more CD20 binding regions comprising or consisting essentially of 85% amino acid identity to CD20 binding region recited herein which for the purposes of determining the degree of amino acid identity, the amino acid residues that form the CDRs or ABRs are disregarded. Extracellular CD20 binding functionality can be determined by the skilled worker using standard techniques.

[0341] The invention further provides variants of the multivalent CD20-binding molecules of the present invention, wherein the Shiga toxin effector region differs from a naturally occurring Shiga toxin A Subunit by up to 1, 2, 3, 4, 5, 6, 7, 8, 9, 10, 15, 20, 25, 30, 35, 40 or more amino acid residues (but by no more than that which retains at least 85%, 90%, 95%, 99% or more amino acid sequence identity). Thus, a polypeptide region derived from an A Subunit of a member of the Shiga toxin family may comprise additions, deletions, truncations, or other alterations from the original sequence as long as at least 85%, 90%, 95%, 99% or more amino acid sequence identity is maintained to a naturally occurring Shiga toxin A Subunit.

[0342] Accordingly, in certain embodiments, the Shiga toxin effector region comprises or consists essentially of amino acid sequences having at least 55%, 60%, 65%, 70%, 75%, 80%, 85%, 90%, 95%, 97%, 98%, 99%, 99.5% or 99.7% overall sequence identity to a naturally occurring Shiga toxin A Subunit, such as SLT-1A (SEQ ID NO:1), StxA (SEQ ID NO:2), and/or SLT-2A (SEQ ID NO:3).

[0343] Optionally, either a full-length or a truncated version of the Shiga toxin A Subunit may comprise one or more mutations (e.g. substitutions, deletions, insertions or inversions). It is preferred in certain embodiments of the invention that the Shiga toxin effector region has sufficient sequence identity to a naturally occurring Shiga toxin A Subunit to retain cytotoxicity after entry into a cell, either by well-known methods of host cell transformation, transfection, infection or induction, or by internalization mediated by the cell targeting CD20 binding region linked with the Shiga toxin effector region. The most critical residues for enzymatic activity and/or cytotoxicity in the Shiga toxin A Subunits have been mapped to the following residue-positions: aspargine-75, tyrosine-77, glutamate-167, arginine-170, and arginine-176 among others (Di R et al., Toxicon 57: 525-39 (2011)). In any one of the embodiments of the invention, the Shiga toxin effector region may preferably but not necessarily maintain one or more conserved amino acids at positions, such as those found at positions 77, 167, 170, and 176 in StxA, SLT-1A, or the equivalent conserved position in other members of the Shiga toxin family which are typically required for cytotoxic activity. The capacity of a cytotoxic multivalent, CD20-binding molecule of the present invention to cause cell death, e.g. its cytotoxicity, may be measured using any one or more of a number of assays well known in the art.

[0344] In certain embodiments of the multivalent CD20-binding molecules of the present invention, one or more amino acid residues may be mutated, inserted, or deleted in order to increase the enzymatic activity of one or more of the molecule's Shiga toxin effector regions. For example, mutating residue-position alanine-231 in Stx1A to glutamate increased Stx1A's enzymatic activity in vitro (Suhan M, Hovde C, Infect Immun 66: 5252-9 (1998)).

[0345] In certain embodiments of the multivalent CD20-binding molecules of the present invention, one or more amino acid residues may be mutated or deleted in order to reduce or eliminate catalytic and/or cytotoxic activity of one or more of the molecule's Shiga toxin effector regions. The catalytic and/or cytotoxic activity of the A Subunits of members of the Shiga toxin family may be reduced or eliminated by mutation or truncation. The positions labeled tyrosine-77, glutamate-167, arginine-170, tyrosine-114, and tryptophan-203 have been shown to be important for the catalytic activity of Stx, Stx1, and Stx2. Mutating both glutamate-167 and arginine-170 eliminated the enzymatic activity of Slt-I A1 in a cell-free ribosome inactivation assay. In another approach using de novo expression of Slt-I A1 in the endoplasmic reticulum, mutating both glutamate-167 and arginine-170 or truncating it to residues 1-239 eliminated Slt-I A1 fragment cytotoxicity at that expression level.

[0346] In certain embodiments, the Shiga toxin effector region(s) may be altered to change its enzymatic activity and/or cytotoxicity as long as the Shiga toxin effector region(s) retains one or more other Shiga toxin effector functions. This change may or may not result in a change in the cytotoxicity of a molecule of which the altered Shiga toxin effector region(s) is a component. Possible alterations include mutations to the Shiga toxin effector region(s) selected from the group consisting of: a truncation, deletion, inversion, insertion, rearrangement, and substitution.

[0347] The cytotoxicity of the A Subunits of members of the Shiga toxin family may be altered, reduced, or eliminated by mutation or truncation. The positions labeled tyrosine-77, glutamate-167, arginine-170, tyrosine-114, and tryptophan-203 have been shown to be important for the catalytic activity of Stx, Stx1, and Stx2. Mutating both glutamate-167 and arginine-170 eliminated the enzymatic activity of Slt-I A1 in a cell-free ribosome inactivation assay. In another approach using de novo expression of Slt-I A1 in the endoplasmic reticulum, mutating both glutamate-167 and arginine-170 eliminated Slt-I A1 fragment cytotoxicity at that expression level. A truncation analysis demonstrated that a fragment of StxA from residues 75 to 268 still retains significant enzymatic activity in vitro. A truncated fragment of Slt-I A1 containing residues 1-239 displayed significant enzymatic activity in vitro and cytotoxicity by de novo expression in the cytosol. Expression of a Slt-I A1 fragment truncated to residues 1-239 in the endoplasmic reticulum was not cytotoxic because the Slt-I A1 truncation could not retrotranslocate to the cytosol.

[0348] The most critical residues for enzymatic activity and/or cytotoxicity in the Shiga toxin A Subunits have been mapped to the following residue-positions: aspargine-75, tyrosine-77, glutamate-167, arginine-170, and arginine-176 among others. In particular, a double-mutant construct of Stx2A containing glutamate-E167-to-lysine and arginine-176-to-lysine mutations was completely inactivated; whereas, many single mutations in Stx1 and Stx2 showed a 10-fold reduction in cytotoxicity. Further, truncation of Stx1A to 1-239 or 1-240 reduced its cytotoxicity, and similarly, truncation of Stx2A to a conserved hydrophobic residue reduced its cytotoxicity.

[0349] The most critical residues for binding eukaryotic ribosomes and/or eukaryotic ribosome inhibition in the Shiga toxin A Subunit have been mapped to the following residue-positions arginine-172, arginine-176, arginine-179, arginine-188, tyrosine-189, valine-191, and leucine-233 among others.

[0350] Shiga-like toxin 1 A Subunit truncations are catalytically active, capable of enzymatically inactivating ribosomes in vitro, and cytotoxic when expressed within a cell. The smallest Shiga toxin A Subunit fragment exhibiting full enzymatic activity is a polypeptide composed of residues 1-239 of Slt1A. Although the smallest fragment of the Shiga toxin A Subunit reported to retain substantial catalytic activity was residues 75-247 of StxA, a StxA truncation expressed de novo within a eukaryotic cell requires only up to residue 240 to reach the cytosol from the endoplasmic reticulum and exert catalytic inactivation of ribosomes.

[0351] In certain multivalent CD20-binding molecules of the present invention which comprise a Shiga toxin effector region derived from SLT-1A (SEQ ID NO:1) or StxA (SEQ ID NO:2), these mutational changes include substitution of the asparagine at position 75, tyrosine at position 77, tyrosine at position 114, glutamate at position 167, arginine at position 170, arginine at position 176, and/or substitution of the tryptophan at position 203. Examples of such substitutions will be known to the skilled worker based on the prior art, such as asparagine at position 75 to alanine, tyrosine at position 77 to serine, substitution of the tyrosine at position 114 to serine, substitution of the glutamate at position 167 to aspartate, substitution of the arginine at position 170 to alanine, substitution of the arginine at position 176 to lysine, and/or substitution of the tryptophan at position 203 to alanine.

[0352] In certain embodiments, the multivalent CD20-binding molecule of the present invention is de-immunized (see e.g., WO 2015/113005 and WO 2015/113007). In certain embodiments, the de-immunized, multivalent CD20-binding molecule of the present invention comprises the protein shown in any one of SEQ ID NOs: 49-51, 63-64, 75-76, 81-82, 87-88, 93-94, 99-100, 105-106, 111-112, 117-118, 122-124, 131-132, 139-140, 144-145, 149-150, 155-156, 161-162, 167-168, 171, 174, 178-180, 192-193, 204-205, 210-211, 216-217, 222-223, 228-229, 234-235, 240-241, 246-247, 251-253, 260-261, 268-269, 273-274, 278-279, 284-285, 290, and 296; and optionally, the protein further comprises an amino-terminal methionine residue. In certain further embodiments, the multivalent CD20-binding molecule of the present invention comprises or consists essentially of two proteins, each protein selected from any one of the polypeptides shown in SEQ ID NOs: 49-51, 63-64, 75-76, 81-82, 87-88, 93-94, 99-100, 105-106, 111-112, 117-118, 122-124, 131-132, 139-140, 144-145, 149-150, 155-156, 161-162, 167-168, 171, 174, 178-180, 192-193, 204-205, 210-211, 216-217, 222-223, 228-229, 234-235, 240-241, 246-247, 251-253, 260-261, 268-269, 273-274, 278-279, 284-285, 290, and 296; and optionally, each protein further comprises an amino-terminal methionine residue. In certain further embodiments, the protein is selected from any one of the proteins shown in SEQ ID NOs: 49-51, 63-64, 75-76, 81-82, 87-88, 93-94, 99-100, 105-106, 111-112, 117-118, 122-124, 131-132, 139-140, 144-145, 149-150, 155-156, 161-162, 167-168, 171, and 174, and further comprises a disulfide bond involving a cysteine residue at the position selected from the group consisting of: 242, 482, 483, 484, 490, 491, 492, 493, 494, 495, 499, 500, 501, 502, 503, 504, 505, 510, 511, 512, 513, and 521.

[0353] Multivalent CD20-binding molecules of the present invention may optionally be conjugated to one or more additional agents, such as therapeutic and/or diagnostic agents known in the art, including such agents as described herein.

### V. Production, Manufacture, and Purification of Multivalent CD20-Binding Molecules of the Present Invention and Compositions Thereof

[0354] The multivalent CD20-binding molecules of the present invention, and compositions thereof, may be produced using biochemical engineering techniques well known to those of skill in the art. For example, multivalent CD20-binding molecules of the present invention, and compositions thereof, may be manufactured by standard synthetic methods, by use of recombinant expression systems, or by any other suitable method. The multivalent CD20-binding molecules of the present invention may be produced as fusion proteins, chemically coupled conjugates, and/or combinations thereof, such as, e.g., a fusion protein component covalently linked to one or more other components of the multivalent CD20-binding molecule of the invention. Thus, the multivalent CD20-binding molecules of the present invention may be synthesized in a number of ways, including, e.g. methods comprising: (1) synthesizing a polypeptide or polypeptide component of a multivalent CD20-binding molecule of the invention using standard solid-phase or liquid-phase methodology, either stepwise or by fragment assembly, and isolating and purifying the final proteinaceous compound product; (2) expressing a polynucleotide that encodes a polypeptide or polypeptide component of a multivalent CD20-binding molecule of the invention in a host cell and recovering the expression product from the host cell or host cell culture; or (3) cell-free in vitro expression of a polynucleotide encoding a polypeptide or polypeptide component of a multivalent CD20-binding molecule of the invention, and recovering the expression product; or by any combination of the methods of (1), (2) or (3) to obtain fragments of a proteinaceous component of a multivalent CD20-binding molecule of the invention, subsequently joining (e.g. ligating) the fragments to obtain the proteinaceous component of a multivalent CD20-binding molecule of the invention, and purifying or recovering that proteinaceous component. For example, polypeptide and/or peptide components may be ligated together using coupling reagents, such as, e.g., N,N′-dicyclohexycarbodiimide and N-ethyl-5-phenyl-isoxazolium-3′-sulfonate (Woodward's reagent K).

[0355] It may be preferable to synthesize a polypeptide or polypeptide component of a multivalent CD20-binding molecule of the present invention by means of solid-phase or liquid-phase peptide synthesis. Multivalent CD20-binding molecules of the present invention may suitably be manufactured by standard synthetic methods. Thus, polypeptides may be synthesized by, e.g. methods comprising synthesizing the polypeptide by standard solid-phase or liquid-phase methodology, either stepwise or by fragment assembly, and isolating and purifying the final polypeptide product. In this context, reference may be made to WO 1998/11125 or, inter alia, Fields G et al., Principles and Practice of Solid-Phase Peptide Synthesis (Synthetic Peptides, Grant G, ed., Oxford University Press, U.K., 2nd ed., 2002) and the synthesis examples therein.

[0356] Multivalent CD20-binding molecules of the present invention may be prepared (produced and purified) using recombinant techniques well known in the art. In general, methods for preparing proteins by culturing host cells transformed or transfected with a vector comprising the encoding polynucleotide and recovering the protein from cell culture are described in, e.g. Sambrook J et al., Molecular Cloning: A Laboratory Manual (Cold Spring Harbor Laboratory Press, NY, U.S., 1989); Dieffenbach C et al., PCR Primer: A Laboratory Manual (Cold Spring Harbor Laboratory Press, N.Y., U.S., 1995). Any suitable host cell may be used to produce a proteinaceous component of a multivalent CD20-binding molecule of the present invention and/or a multivalent CD20-binding protein of the invention. Host cells may be cells stably or transiently transfected, transformed, transduced or infected with one or more expression vectors which drive expression of a multivalent CD20-binding protein of the invention and/or a proteinaceous component of a multivalent CD20-binding molecule of the present invention. In addition, a multivalent CD20-binding protein of the present invention may be produced by modifying the polynucleotide encoding the multivalent CD20-binding molecule of the invention, or proteinaceous component thereof, described herein that result in altering one or more amino acids or deleting or inserting one or more amino acids in order to achieve desired properties, such as changed cytotoxicity, changed cytostatic effects, changed immunogenicity, and/or changed serum half-life.

[0357] There are a wide variety of expression systems which may be chosen to produce a multivalent CD20-binding protein of the invention and/or a proteinaceous component of a multivalent CD20-binding molecule of the present invention. For example, host organisms for expression of a multivalent CD20-binding protein of the invention and/or a proteinaceous component of a multivalent CD20-binding molecule of the present invention include prokaryotes, such as E. coli and B. subtilis, eukaryotic cells, such as yeast and filamentous fungi (like S. cerevisiae, P. pastoris, A. awamori, and K. lactis), algae (like C. reinhardtii), insect cell lines, mammalian cells (like CHO cells), plant cell lines, and eukaryotic organisms such as transgenic plants (like A. thaliana and N. benthamiana) (see e.g., Pack P, Plückthun A, Biochemistry (Mosc) 31: 1579-84 (1992); Blanco B et al., J Immunol 171: 1070-7 (2003); Sánchez-Arevalo Lobo V et al., Int J Cancer 119: 455-62 (2006); Mazor Y et al., Nat Biotechnol 25: 563-5 (2007); Schoonooghe S et al., BMC Biotechnol 9: 70 (2009); Chan C et al., PLoS One 5: e10261 (2010); Cuesta M et al., Trends Biotechnol 28: 355-62 (2010); Gershenson A, Gierasch L, Curr Opin Struct Biol 21: 32-41 (2011); Hutchins B et al., J Mol Biol 406: 595-603 (2011); Powers G et al., Methods Mol Biol 907: 699-712 (2012); Wang L et al., Protein Eng Des Sel 26: 417-23 (2013); Blanco-Toribio A et al., Microb Cell Fact 13: 116 (2014); Spadiut O et al., Trends Biotechnol 32: 54-60 (2014); Turki I et al., Mol Immunol 57: 66-73 (2014); Blanco-Toribio A et al., AMB Expr 5: 45 (2015)); Nuñez-Prado N et al., Drug Discov Today 20: 588-94 (2015)).

[0358] Accordingly, the present invention also provides methods for producing a multivalent CD20-binding molecule of the present invention according to above recited methods and using (i) a polynucleotide encoding part or all of a proteinaceous component of a multivalent CD20-binding molecule of the present invention and/or a multivalent CD20-binding protein of the present invention, (ii) an expression vector comprising at least one polynucleotide of the invention capable of encoding part or all of a multivalent CD20-binding molecule of the present invention and/or a multivalent CD20-binding protein of the present invention when introduced into a suitable host cell or cell-free expression system, and/or (iii) a host cell comprising a polynucleotide or expression vector of the present invention.

[0359] When a protein is expressed using recombinant techniques in a host cell or cell-free system, it is advantageous to separate (or purify) the desired protein away from other components, such as host cell factors, in order to obtain preparations that are of high purity or are substantially homogeneous. Purification can be accomplished by methods well known in the art, such as centrifugation techniques, extraction techniques, chromatographic and fractionation techniques (e.g. size separation by gel filtration, charge separation by ion-exchange column, hydrophobic interaction chromatography, reverse phase chromatography, chromatography on silica or cation-exchange resins such as diethylaminoethyl (DEAE) resins and the like, chromatofocusing, and Protein A Sepharose chromatography to remove contaminants), and precipitation techniques (e.g. ethanol precipitation or ammonium sulfate precipitation). Any number of biochemical purification techniques may be used to increase the purity of a multivalent CD20-binding molecule of the present invention. In certain embodiments, the multivalent CD20-binding molecules of the present invention may optionally be purified in homo-multimeric forms (e.g. a protein complex of two or more identical, CD20-binding proteins) or in hetero-multimeric forms (e.g. a protein complex of two or more non-identical CD20-binding proteins).

[0360] In the Examples below are descriptions of non-limiting examples of methods for producing a multivalent CD20-binding molecule of the present invention and compositions thereof, as well as specific but non-limiting aspects of production of certain, disclosed, exemplary, cytotoxic, multivalent CD20-binding molecules of the present invention.

### VI. Molecules of the Present Invention Immobilized on Solid Substrates

[0361] Certain embodiments of the present invention include a molecule of the present invention (e.g., a multivalent CD20-binding molecule or any effector fragment thereof) immobilized on a solid substrate. Solid substrates contemplated herein include, but are not limited to, microbeads, nanoparticles, polymers, matrix materials, microarrays, microtiter plates, or any solid surface known in the art (see e.g. U.S. Pat. No. 7,771,955). In accordance with these embodiments, a molecule of the present invention may be covalently or non-covalently linked to a solid substrate, such as, e.g., a bead, particle, or plate, using techniques known to the skilled worker (see e.g. Jung Y et al., Analyst 133: 697-701 (2008)) Immobilized molecules of the invention may be used for screening applications using techniques known in the art (see e.g. Bradbury A et al., Nat Biotechnol 29: 245-54 (2011); Sutton C, Br J Pharmacol 166: 457-75 (2012); Diamante L et al., Protein Eng Des Sel 26: 713-24 (2013); Houlihan G et al., J Immunol Methods 405: 47-56 (2014)).

[0362] Non-limiting examples of solid substrates to which a molecule of the present invention may be immobilized on include: microbeads, nanoparticles, polymers, nanopolymers, nanotubes, magnetic beads, paramagnetic beads, superparamagnetic beads, streptavidin coated beads, reverse-phase magnetic beads, carboxy terminated beads, hydrazine terminated beads, silica (sodium silica) beads, iminodiacetic acid (IDA)-modified beads, aldehyde-modified beads, epoxy-activated beads, diaminodipropylamine (DADPA)-modified beads (beads with primary amine surface group), biodegradable polymeric beads, polystyrene substrates, amino-polystyrene particles, carboxyl-polystyrene particles, epoxy-polystyrene particles, dimethylamino-polystyrene particles, hydroxy-polystyrene particles, colored particles, flow cytometry particles, sulfonate-polystyrene particles, nitrocellulose surfaces, reinforced nitrocellulose membranes, nylon membranes, glass surfaces, activated glass surfaces, activated quartz surfaces, polyvinylidene difluoride (PVDF) membranes, polyacrylamide-based substrates, poly-vinyl chloride substrates, poly-methyl methacrylate substrates, poly(dimethyl siloxane) substrates, and photopolymers which contain photoreactive species (such as, e.g., nitrenes, carbenes, and ketyl radicals) capable of forming covalent linkages. Other examples of solid substrates to which a molecule of the present invention may be immobilized on are commonly used in molecular display systems, such as, e.g., cellular surfaces, phages, and virus particles.

### VII. Pharmaceutical and Diagnostic Compositions Comprising a Multivalent CD20-Binding Molecule of the Present Invention

[0363] The present invention provides multivalent CD20-binding molecules for use, alone or in combination with one or more additional therapeutic agents, in a pharmaceutical composition, for treatment or prophylaxis of conditions, diseases, disorders, or symptoms described in further detail below (e.g., cancers, malignant tumors, non-malignant tumors, growth abnormalities, and immune disorders). The present invention further provides pharmaceutical compositions comprising a multivalent CD20-binding molecule of the present invention, or a pharmaceutically acceptable salt or solvate thereof, according to the invention, together with at least one pharmaceutically acceptable carrier, excipient, or vehicle. In certain embodiments, the pharmaceutical composition of the present invention may comprise multivalent CD20-binding molecules that are homo-multimeric and/or hetero-multimeric. The pharmaceutical compositions of the present invention are useful in methods of treating, ameliorating, or preventing a disease, condition, disorder, or symptom described in further detail below. Each such disease, condition, disorder, or symptom is envisioned to be a separate embodiment with respect to uses of a pharmaceutical composition according to the invention. The invention further provides pharmaceutical compositions for use in at least one method of treatment according to the invention, as described in more detail below.

[0364] As used herein, the terms “patient” and “subject” are used interchangeably to refer to any organism, commonly vertebrates such as humans and animals, which presents symptoms, signs, and/or indications of at least one disease, disorder, or condition. These terms include mammals such as the non-limiting examples of primates, livestock animals (e.g. cattle, horses, pigs, sheep, goats, etc.), companion animals (e.g. cats, dogs, etc.) and laboratory animals (e.g. mice, rabbits, rats, etc.).

[0365] As used herein, “treat,” “treating,” or “treatment” and grammatical variants thereof refer to an approach for obtaining beneficial or desired clinical results. The terms may refer to slowing the onset or rate of development of a condition, disorder or disease, reducing or alleviating symptoms associated with it, generating a complete or partial regression of the condition, or some combination of any of the above. For the purposes of this invention, beneficial or desired clinical results include, but are not limited to, reduction or alleviation of symptoms, diminishment of extent of disease, stabilization (e.g. not worsening) of state of disease, delay or slowing of disease progression, amelioration or palliation of the disease state, and remission (whether partial or total), whether detectable or undetectable. “Treat,” “treating,” or “treatment” can also mean prolonging survival relative to expected survival time if not receiving treatment. A subject (e.g. a human) in need of treatment may thus be a subject already afflicted with the disease or disorder in question. The terms “treat,” “treating,” or “treatment” includes inhibition or reduction of an increase in severity of a pathological state or symptoms relative to the absence of treatment, and is not necessarily meant to imply complete cessation of the relevant disease, disorder, or condition. With regard to tumors and/or cancers, treatment includes reductions in overall tumor burden and/or individual tumor size.

[0366] As used herein, the terms “prevent,” “preventing,” “prevention” and grammatical variants thereof refer to an approach for preventing the development of, or altering the pathology of, a condition, disease, or disorder. Accordingly, “prevention” may refer to prophylactic or preventive measures. For the purposes of this invention, beneficial or desired clinical results include, but are not limited to, prevention or slowing of symptoms, progression or development of a disease, whether detectable or undetectable. A subject (e.g. a human) in need of prevention may thus be a subject not yet afflicted with the disease or disorder in question. The term “prevention” includes slowing the onset of disease relative to the absence of treatment, and is not necessarily meant to imply permanent prevention of the relevant disease, disorder or condition. Thus “preventing” or “prevention” of a condition may in certain contexts refer to reducing the risk of developing the condition, or preventing or delaying the development of symptoms associated with the condition.

[0367] As used herein, an “effective amount” or “therapeutically effective amount” is an amount or dose of a composition (e.g. a therapeutic composition, compound, or agent) that produces at least one desired therapeutic effect in a subject, such as preventing or treating a target condition or beneficially alleviating a symptom associated with the condition. The most desirable therapeutically effective amount is an amount that will produce a desired efficacy of a particular treatment selected by one of skill in the art for a given subject in need thereof. This amount will vary depending upon a variety of factors understood by the skilled worker, including but not limited to the characteristics of the therapeutic composition (including activity, pharmacokinetics, pharmacodynamics, and bioavailability), the physiological condition of the subject (including age, sex, disease type, disease stage, general physical condition, responsiveness to a given dosage, and type of medication), the nature of the pharmaceutically acceptable carrier or carriers in the formulation, and the route of administration. One skilled in the clinical and pharmacological arts will be able to determine a therapeutically effective amount through routine experimentation, namely by monitoring a subject's response to administration of a composition and adjusting the dosage accordingly (see e.g. Remington: The Science and Practice of Pharmacy (Gennaro A, ed., Mack Publishing Co., Easton, Pa., U.S., 19th ed., 1995)).

[0368] Diagnostic compositions comprise a multivalent CD20-binding molecule of the present invention and one or more detection promoting agents. When producing or manufacturing a diagnostic composition of the present invention, a multivalent CD20-binding molecule of the invention may be directly or indirectly linked to one or more detection promoting agents. There are numerous standard techniques known to the skilled worker for incorporating, affixing, and/or conjugating various detection promoting agents to proteins or proteinaceous components of molecules, especially to immunoglobulins and immunoglobulin-derived domains.

[0369] Diagnostic compositions of the present invention comprise a multivalent CD20-binding molecule of the present invention and one or more detection promoting agents. Various detection promoting agents are known in the art, such as isotopes, dyes, colorimetric agents, contrast enhancing agents, fluorescent agents, bioluminescent agents, and magnetic agents. These agents may be associated with, linked to, and/or incorporated within the multivalent CD20-binding molecule at any suitable position. For example, the linkage or incorporation of the detection promoting agent may be via an amino acid residue(s) of the multivalent CD20-binding molecule of the present invention or via some type of linkage known in the art, including via linkers and/or chelators. The association of the detection promoting agent with a multivalent CD20-binding molecule of a diagnostic composition of the present invention is in such a way to enable the detection of the presence of the multivalent CD20-binding molecule, and a diagnostic composition thereof, in a screen, assay, diagnostic procedure, and/or imaging technique.

[0370] There are numerous detection promoting agents known to the skilled worker which can be operably associated or linked to the multivalent CD20-binding molecules of the present invention for information gathering methods, such as for diagnostic and/or prognostic applications to diseases, disorders, or conditions of an organism. For example, detection promoting agents include image enhancing contrast agents, such as fluorescent dyes (e.g. Alexa680, indocyanine green, and Cy5.5), isotopes and radionuclides, such as ¹¹C, ¹³N, ¹⁵O, ¹⁸F, ³²P, ⁵¹Mn, ⁵²mMn, ⁵²Fe, ⁵⁵Co, ⁶²Cu, ⁶⁴Cu, ⁶⁷Cu, ⁶⁷Ga, ⁶⁸Ga, ⁷²As, ⁷³Se, ⁷⁵Br, ⁷⁶Br, ⁸²mRb, ⁸³Sr, ⁸⁶Y, ⁹⁰Y, ⁸⁹Zr, ⁹⁴mTc, ⁹⁴Tc, ⁹⁹mTc, ¹¹⁰In, ¹¹¹In, ¹²⁰I, ¹²³I, ¹²⁴I, ¹²⁵I, ¹³¹I, ¹⁵⁴Gd, ¹⁵⁵Gd, ¹⁵⁶Gd, ¹⁵⁷Gd, ¹⁵⁸Gd, ¹⁷⁷Lu, ¹⁸⁶Re, ¹⁸⁸Re, and ²²³R; paramagnetic ions, such as chromium (III), manganese (II), iron (III), iron (II), cobalt (II), nickel (II), copper (II), neodymium (III), samarium (III), ytterbium (III), gadolinium (III), vanadium (II), terbium (III), dysprosium (III), holmium (III) or erbium (III); metals, such as lanthanum (III), gold (III), lead (II), and bismuth (III); ultrasound-contrast enhancing agents, such as liposomes; radiopaque agents, such as barium, gallium, and thallium compounds. Detection promoting agents may be incorporated directly or indirectly by using an intermediary functional group, such as chelators like 2-benzyl DTPA, PAMAM, NOTA, DOTA, TETA, analogs thereof, and functional equivalents of any of the foregoing.

[0371] There are numerous imaging approaches in the art which are known to the skilled worker, such as non-invasive in vivo imaging techniques commonly used in the medical arena, for example: computed tomography imaging (CT scanning), optical imaging (including direct, fluorescent, and bioluminescent imaging), magnetic resonance imaging (MRI), positron emission tomography (PET), single-photon emission computed tomography (SPECT), ultrasound, and x-ray computed tomography imaging.

[0372] The phrase “diagnostically sufficient amount” refers to an amount that provides adequate detection and accurate measurement for information gathering purposes by the particular assay or diagnostic technique utilized. Generally, the diagnostically sufficient amount for whole organism, in vivo, diagnostic use will be a non-cumulative dose of between 0.001 mg to 1 mg of the detection promoting agent linked to multivalent CD20-binding molecule per kilogram (kg) of subject per subject (mg/kg). However, the diagnostically sufficient amount for whole organism, in vivo, diagnostic use may be a non-cumulative dose of between 0.0001 mg to 10 mg of the detection promoting agent linked to multivalent CD20-binding molecule per kilogram (kg) of subject per subject (mg/kg). Typically, the amount of multivalent CD20-binding molecule of the present invention used in these information gathering methods will be as low as possible provided that it is still a diagnostically sufficient amount. For example, for in vivo detection in an organism, the amount of multivalent CD20-binding molecule or diagnostic composition of the present invention administered to a subject will be as low as feasibly possible.

Production or Manufacture of a Pharmaceutical and/or Diagnostic Composition Comprising a Multivalent CD20-Binding Molecule of the Present Invention and/or a Composition Thereof

[0373] Pharmaceutically acceptable salts or solvates of any of the multivalent CD20-binding molecules of the present invention are within the scope of the present invention.

[0374] The term “solvate” in the context of the present invention refers to a complex of defined stoichiometry formed between a solute (e.g. in casu, a proteinaceous compound or pharmaceutically acceptable salt thereof according to the invention) and a solvent. The solvent in this connection may, for example, be water, ethanol or another pharmaceutically acceptable, typically small-molecular organic species, such as, but not limited to, acetic acid or lactic acid. When the solvent in question is water, such a solvate is normally referred to as a hydrate.

[0375] Multivalent CD20-binding molecules of the present invention, or salts thereof, may be formulated as pharmaceutical compositions prepared for storage or administration, which typically comprise a therapeutically effective amount of a molecule or composition of the present invention, or a salt thereof, in a pharmaceutically acceptable carrier. The term “pharmaceutically acceptable carrier” includes any of the standard pharmaceutical carriers. Pharmaceutically acceptable carriers for therapeutic use are well known in the pharmaceutical art, and are described, for example, in Remington's Pharmaceutical Sciences (Mack Publishing Co. (A. Gennaro, ed., 1985)). As used herein, “pharmaceutically acceptable carrier” includes any and all physiologically acceptable, i.e. compatible, solvents, dispersion media, coatings, antimicrobial agents, isotonic, and absorption delaying agents, and the like. Pharmaceutically acceptable carriers or diluents include those used in formulations suitable for oral, rectal, nasal or parenteral (including subcutaneous, intramuscular, intravenous, intradermal, and transdermal) administration. Exemplary pharmaceutically acceptable carriers include sterile aqueous solutions or dispersions and sterile powders for the extemporaneous preparation of sterile injectable solutions or dispersions. Examples of suitable aqueous and nonaqueous carriers that may be employed in the pharmaceutical compositions of the invention include water, ethanol, polyols (such as glycerol, propylene glycol, polyethylene glycol, and the like), and suitable mixtures thereof, vegetable oils, such as olive oil, and injectable organic esters, such as ethyloleate. Proper fluidity can be maintained, for example, by the use of coating materials, such as lecithin, by the maintenance of the required particle size in the case of dispersions, and by the use of surfactants. In certain embodiments, the carrier is suitable for intravenous, intramuscular, subcutaneous, parenteral, spinal or epidermal administration (e.g. by injection or infusion). Depending on selected route of administration, the multivalent CD20-binding molecule of the present invention or other pharmaceutical component may be coated in a material intended to protect the multivalent CD20-binding molecule and/or a compound thereof from the action of low pH and other natural inactivating conditions to which the active multivalent CD20-binding molecule of the invention may encounter when administered to a patient by a particular route of administration.

[0376] The pharmaceutical compositions of the present invention may also contain adjuvants such as preservatives, wetting agents, emulsifying agents and dispersing agents. Preventing the presence of microorganisms may be ensured both by sterilization procedures, and by the inclusion of various antibacterial and antifungal agents, for example, paraben, chlorobutanol, phenol sorbic acid, and the like. Isotonic agents, such as sugars, sodium chloride, and the like into the compositions, may also be desirable. In addition, prolonged absorption of the injectable pharmaceutical form may be brought about by the inclusion of agents which delay absorption such as, aluminum monostearate and gelatin.

[0377] A pharmaceutical composition of the present invention also optionally includes a pharmaceutically acceptable antioxidant. Exemplary pharmaceutically acceptable antioxidants are water soluble antioxidants such as ascorbic acid, cysteine hydrochloride, sodium bisulfate, sodium metabisulfite, sodium sulfite and the like; oil-soluble antioxidants, such as ascorbyl palmitate, butylated hydroxyanisole (BHA), butylated hydroxytoluene (BHT), lecithin, propylgallate, alpha-tocopherol, and the like; and metal chelating agents, such as citric acid, ethylenediamine tetraacetic acid (EDTA), sorbitol, tartaric acid, phosphoric acid, and the like.

[0378] In another aspect, the present invention provides pharmaceutical compositions comprising one or a combination of different, multivalent CD20-binding molecules of the present invention, or an ester, salt or amide of any of the foregoing, and at least one pharmaceutically acceptable carrier.

[0379] A pharmaceutical composition of the present invention optionally includes a pharmaceutically acceptable excipient. Non-limiting examples of pharmaceutically acceptable excipients include arginine, arginine sulfate, citric acid, glycerol, hydrochloric acid, mannitol, methionine, polysorbate, sodium chloride, sodium citrate, sodium hydroxide, sorbitol, sucrose, trehalose, and/or water. In certain embodiments, the pharmaceutical composition of the present invention comprises an aqueous carrier and at least one pharmaceutically acceptable excipient. In certain other embodiments, the pharmaceutical composition of the present invention comprises a salt and/or powder, such as, e.g. a freeze-dried, lyophilized, dehydrated, and/or cryodesiccated composition comprising at least one pharmaceutically acceptable excipient. In certain embodiments of the pharmaceutical composition of the present invention, the excipient functions to reduce and/or limit the immunogenicity and/or immunogenic potential of the multivalent CD20-binding molecule, such as, e.g. after administration and/or repeated administration to a mammal.

[0380] The pharmaceutical compositions of the present invention may comprise one or more adjuvants such as a buffer, tonicity-adjusting agent (isotonic agent), antioxidant, surfactant, stabilizer, preservative, emulsifying agent, cryoprotective agent, wetting agent, and/or dispersing agent or other additives well known to those of skill in the art, such as, e.g. a binding agent. In certain embodiments, the pharmaceutical composition of the present invention comprises an aqueous carrier and a pharmaceutically acceptable adjuvant or other additive. In certain other embodiments, the pharmaceutical composition of the present invention comprises a salt and/or powder, such as, e.g. a freeze-dried, lyophilized, dehydrated, and/or cryodesiccated composition comprising a pharmaceutically acceptable adjuvant or other additive. Non-limiting examples of pharmaceutically suitable stabilizers include human albumin and polysorbates such as, e.g., polyoxyethylene (20) sorbitan monolaurate (polysorbate 20), polyoxyethylene (20) sorbitan monopalmitate (polysorbate 40), polyoxyethylene (20) sorbitan monostearate (polysorbate 60), and (polyoxyethylene (20) sorbitan monooleate (polysorbate 80).

[0381] The pharmaceutical composition of the present invention may comprise one or more pharmaceutically acceptable buffers. Non-limiting examples of suitable buffers include acetate, citrate, citric acid, histidine, phosphate, sodium citrate, and succinate buffers. In certain embodiments, the pharmaceutical composition of the present invention comprises an aqueous carrier comprising a pharmaceutically acceptable buffer. In certain other embodiments, the pharmaceutical composition of the present invention comprises a salt and/or powder, such as, e.g. a freeze-dried, lyophilized, dehydrated, and/or cryodesiccated composition comprising a pharmaceutically acceptable buffer.

[0382] The pharmaceutical composition of the present invention may comprise one or more pharmaceutically acceptable isotonic agents or tonicity-adjusting agents. Non-limiting examples of suitable isotonic agents include sugars (e.g. dextrose), sugar alcohols, sodium chloride, and the like. Further examples of suitable sugars include disaccharides like sucrose and trehalose. Exemplary, pharmaceutically acceptable sugar alcohols include glycerol, mannitol, and sorbitol. In certain embodiments, the pharmaceutical composition of the present invention comprises an aqueous carrier and a pharmaceutically acceptable isotonic agent. In certain other embodiments, the pharmaceutical composition of the present invention comprises a salt and/or powder, such as, e.g. a freeze-dried, lyophilized, dehydrated, and/or cryodesiccated composition comprising a pharmaceutically acceptable isotonic agent.

[0383] The pharmaceutical compositions of the present invention may comprise one or more pharmaceutically acceptable antioxidants. Exemplary pharmaceutically acceptable antioxidants include water soluble antioxidants, such as, e.g., ascorbic acid, cysteine hydrochloride, methionine, sodium bisulfate, sodium metabisulfite, sodium sulfite and the like; oil-soluble antioxidants, such as, e.g., ascorbyl palmitate, butylated hydroxyanisole (BHA), butylated hydroxytoluene (BHT), lecithin, propylgallate, alpha-tocopherol, and the like; and metal-chelating agents, such as, e.g., citric acid, ethylenediamine tetraacetic acid (EDTA), sorbitol, tartaric acid, phosphoric acid, and the like. In certain embodiments, the pharmaceutical composition of the present invention comprises an aqueous carrier and a pharmaceutically acceptable antioxidant. In certain other embodiments, the pharmaceutical composition of the present invention comprises a salt and/or powder, such as, e.g. a freeze-dried, lyophilized, dehydrated, and/or cryodesiccated composition comprising a pharmaceutically acceptable antioxidant.

[0384] A pharmaceutical composition of the present invention may comprise one or more pharmaceutically acceptable surfactants and/or emulsifying agents (emulsifiers). Non-limiting examples of suitable surfactants and/or emulsifiers include polysorbates such as, e.g., polyoxyethylene (20) sorbitan monolaurate (polysorbate 20), polyoxyethylene (20) sorbitan monopalmitate (polysorbate 40), polyoxyethylene (20) sorbitan monostearate (polysorbate 60), and (polyoxyethylene (20) sorbitan monooleate (polysorbate 80). In certain embodiments, the pharmaceutical composition of the present invention comprises an aqueous carrier and a pharmaceutically acceptable surfactant and/or emulsifier. In certain other embodiments, the pharmaceutical composition of the present invention comprises a salt and/or powder, such as, e.g. a freeze-dried, lyophilized, dehydrated, and/or cryodesiccated composition comprising a pharmaceutically acceptable surfactant and/or emulsifier. One or more surfactants and/or emulsifying agents may also be desirable in a pharmaceutical composition of the present invention to help prevent aggregation of the cell-targeting molecule of the present invention. The pharmaceutical compositions of the present invention may comprise one or more pharmaceutically acceptable preservative agents. For example, preventing the presence of microorganisms may be ensured both by sterilization procedures, and by the inclusion of various antibacterial and antifungal agents, such as, e.g., paraben, chlorobutanol, phenol sorbic acid, and the like in the compositions of the present invention.

[0385] A pharmaceutical composition of the present invention may comprise one or more pharmaceutically acceptable cryoprotective agents, also referred to as cryoprotectants or cryogenic protectants. Non-limiting examples of suitable cryoprotectants include ethylene glycol, glycerol, sorbitol, sucrose, and trehalose. In certain embodiments, the pharmaceutical composition of the present invention comprises an aqueous carrier and a pharmaceutically acceptable cryoprotectant. In certain other embodiments, the pharmaceutical composition of the present invention comprises a salt and/or powder, such as, e.g. a freeze-dried, lyophilized, dehydrated, and/or cryodesiccated composition comprising a pharmaceutically acceptable cryoprotectant.

[0386] In addition, prolonged absorption of the injectable pharmaceutical form may be brought about by the inclusion of agents which delay absorption such as, e.g., a monostearate salt, aluminum monostearate, and/or gelatin.

[0387] In another aspect, the present invention provides pharmaceutical compositions comprising one or a combination of different polypeptides and/or cell-targeting molecules of the invention, or an ester, salt or amide of any of the foregoing, and at least one pharmaceutically acceptable carrier.

[0388] The pH of the pharmaceutical composition of the present invention can be adjusted with acids or bases, such as hydrochloric acid or sodium hydroxide, or buffers with acetate, citrate, citric acid, histidine, sodium citrate, succinate, phosphate, and the like. Non-limiting examples of pharmaceutically acceptable solvents or carriers for use in a pharmaceutical composition of the present invention include aqueous solutions comprising a cell-targeting molecule of the present invention and a buffer such as, e.g., citrate, histidine, phosphate, or succinate adjusted to pH 5.0, 6.0, 7.0, or 4.0, respectively. Certain embodiments of the present invention include compositions comprising one of the aforementioned solvents and/or carriers of the present invention.

[0389] Pharmaceutical compositions of the present invention that are solutions or suspensions used for intradermal or subcutaneous application typically include one or more of: a sterile diluent such as water for injection, saline solution, fixed oils, polyethylene glycols, glycerine, propylene glycol or other synthetic solvents; antibacterial agents such as benzyl alcohol or methyl parabens; antioxidants such as ascorbic acid, cysteine hydrochloride, methionine, sodium bisulfate, sodium metabisulfite, and sodium sulfite; chelating agents such as citric acid, ethylenediaminetetraacetic acid, sorbitol, tartaric acid, and phosphoric acid; surfactants such as a polysorbate; buffers such as acetate, citrate, histidine, and phosphate buffers; and tonicity adjusting agents such as, e.g., dextrose, glycerol, mannitol, sodium chloride, sorbitol, sucrose, and trehalose. Such preparations may be enclosed in ampoules, disposable syringes or multiple dose vials made of a glass or plastic.

[0390] Sterile injectable solutions may be prepared by incorporating a protein or cell-targeting molecule of the present invention in the required amount in an appropriate solvent with one or a combination of ingredients described above, as required, followed by sterilization microfiltration. Dispersions may be prepared by incorporating the active compound into a sterile vehicle that contains a dispersion medium and other ingredients, such as those described above. In the case of sterile powders for the preparation of sterile injectable solutions, the methods of preparation are vacuum drying and freeze-drying (lyophilization) that yield a powder of the active ingredient in addition to any additional desired ingredient from a sterile-filtered solution thereof. In certain embodiments, the pharmaceutical composition of the present invention comprises a powder comprising sorbitol, trehalose, sodium citrate, and polysorbate-20, and optionally, further comprises glycerol and/or methionine. In certain embodiments, the pharmaceutical composition of the present invention comprises sodium citrate, trehalose, and polysorbate-20, and optionally, further comprises glycerol and/or methionine.

[0391] In certain embodiments, the pharmaceutical composition of the present invention comprises sorbitol, sodium citrate, and polysorbate-20, and optionally, further comprises albumin, glycerol, and/or methionine. In certain embodiments, the pharmaceutical composition of the present invention comprises sorbitol, histidine, and polysorbate-20, and optionally, further comprises albumin, glycerol, and/or methionine.

[0392] The formulations of the pharmaceutical compositions of the present invention may conveniently be presented in unit dosage form and may be prepared by any of the methods well known in the art of pharmacy. In such form, the composition is divided into unit doses containing appropriate quantities of the active component. The unit dosage form can be a packaged preparation, the package containing discrete quantities of the preparations, for example, packeted tablets, capsules, and powders in vials or ampoules. The unit dosage form can also be a capsule, cachet, or tablet itself, or it can be the appropriate number of any of these packaged forms. It may be provided in single dose injectable form, for example in the form of a pen. Compositions may be formulated for any suitable route and means of administration. Subcutaneous or transdermal modes of administration may be particularly suitable for pharmaceutical compositions and therapeutic molecules described herein.

[0393] Therapeutic compositions are typically sterile and stable under the conditions of manufacture and storage. The composition may be formulated as a solution, microemulsion, liposome, or other ordered structure suitable to high drug concentration. The carrier may be a solvent or dispersion medium containing, for example, water, alcohol such as ethanol, polyol (e.g. glycerol, propylene glycol, and liquid polyethylene glycol), or any suitable mixtures. The proper fluidity may be maintained, for example, by the use of a coating such as lecithin, by the maintenance of the required particle size in the case of dispersion and by use of surfactants according to formulation chemistry well known in the art. In certain embodiments, isotonic agents, e.g. sugars, polyalcohols such as mannitol, sorbitol, or sodium chloride may be desirable in the composition. Prolonged absorption of injectable compositions may be brought about by including in the composition an agent that delays absorption for example, monostearate salts and gelatin.

[0394] Solutions or suspensions used for intradermal or subcutaneous application typically include one or more of: a sterile diluent such as water for injection, saline solution, fixed oils, polyethylene glycols, glycerine, propylene glycol or other synthetic solvents; antibacterial agents such as benzyl alcohol or methyl parabens; antioxidants such as ascorbic acid or sodium bisulfite; chelating agents such as ethylenediaminetetraacetic acid; buffers such as acetates, citrates or phosphates; and tonicity adjusting agents such as, e.g., sodium chloride or dextrose. The pH can be adjusted with acids or bases, such as hydrochloric acid or sodium hydroxide, or buffers with citrate, phosphate, acetate and the like. Such preparations may be enclosed in ampoules, disposable syringes or multiple dose vials made of glass or plastic.

[0395] Sterile injectable solutions may be prepared by incorporating a multivalent CD20-binding molecule of the present invention in the required amount in an appropriate solvent with one or a combination of ingredients described above, as required, followed by sterilization microfiltration. Dispersions may be prepared by incorporating the active compound into a sterile vehicle that contains a dispersion medium and other ingredients, such as those described above. In the case of sterile powders for the preparation of sterile injectable solutions, the methods of preparation are vacuum drying and freeze-drying (lyophilization) that yield a powder of the active ingredient in addition to any additional desired ingredient from a sterile-filtered solution thereof.

[0396] When a therapeutically effective amount of a multivalent CD20-binding molecule of the present invention is designed to be administered by, e.g. intravenous, cutaneous or subcutaneous injection, the binding agent will be in the form of a pyrogen-free, parenterally acceptable aqueous solution. Methods for preparing parenterally acceptable protein solutions, taking into consideration appropriate pH, isotonicity, stability, and the like, are within the skill in the art. A preferred pharmaceutical composition for intravenous, cutaneous, or subcutaneous injection will contain, in addition to binding agents, an isotonic vehicle such as sodium chloride injection, Ringer's injection, dextrose injection, dextrose and sodium chloride injection, lactated Ringer's injection, or other vehicle as known in the art. A pharmaceutical composition of the present invention may also contain stabilizers, preservatives, buffers, antioxidants, or other additives well known to those of skill in the art.

[0397] As described elsewhere herein, a multivalent CD20-binding molecule of the present invention or composition thereof (e.g. pharmaceutical or diagnostic composition) may be prepared with carriers that will protect the multivalent CD20-binding molecule of the invention against rapid release, such as a controlled release formulation, including implants, transdermal patches, and microencapsulated delivery systems. Biodegradable, biocompatible polymers can be used, such as ethylene vinyl acetate, polyanhydrides, polyglycolic acid, collagen, polyorthoesters, and polylactic acid. Many methods for the preparation of such formulations are patented or generally known to those skilled in the art (see e.g. Sustained and Controlled Release Drug Delivery Systems (Robinson J, ed., Marcel Dekker, Inc., NY, U.S., 1978).

[0398] In certain embodiments, the composition of the present invention (e.g. pharmaceutical or diagnostic compositions) may be formulated to ensure a desired distribution in vivo. For example, the blood-brain barrier excludes many large and/or hydrophilic compounds. To target a therapeutic molecule or composition of the present invention to a particular in vivo location, it can be formulated, for example, in liposomes which may comprise one or more moieties that are selectively transported into specific cells or organs, thus enhancing targeted drug delivery. Exemplary targeting moieties include folate or biotin; mannosides; antibodies; surfactant protein A receptor; p120 catenin and the like.

[0399] Pharmaceutical compositions include parenteral formulations designed to be used as implants or particulate systems. Examples of implants are depot formulations composed of polymeric or hydrophobic components such as emulsions, ion exchange resins, and soluble salt solutions. Examples of particulate systems are microspheres, microparticles, nanocapsules, nanospheres, and nanoparticles. Controlled release formulations may be prepared using polymers sensitive to ions, such as, e.g. liposomes, polaxamer 407, and hydroxyapatite.

[0400] Pharmaceutical compositions of the present invention may be produced using techniques known in the art such that the produced compositions comprise emulsions, liposomes, niosomes, polymeric nanoparticles, and/or solid lipid nanoparticles (SLNs) (see e.g. Lakshmi P et al., Venereal Leprol 73: 157-161 (2007); A Revolution in Dosage Form Design and Development, Recent Advances in Novel Drug Carrier Systems (Sezer A, ed., InTech, 2012)).

### VIII. Polynucleotides, Expression Vectors, and Host Cells of the Invention

[0401] Beyond the multivalent CD20-binding molecules of the present invention and compositions thereof, the polynucleotides that encode such multivalent CD20-binding molecules, the proteinaceous components of such multivalent CD20-binding molecules, or functional portions thereof, are also encompassed within the scope of the present invention. The term “polynucleotide” is equivalent to the term “nucleic acids,” each of which includes one or more of: polymers of deoxyribonucleic acids (DNAs), polymers of ribonucleic acids (RNAs), analogs of these DNAs or RNAs generated using nucleotide analogs, and derivatives, fragments and homologs thereof. The polynucleotide of the invention may be single-, double-, or triple-stranded. Such polynucleotides are specifically disclosed to include all polynucleotides capable of encoding an exemplary protein, for example, taking into account the wobble known to be tolerated in the third position of RNA codons, yet encoding for the same amino acid as a different RNA codon (see Stothard P, Biotechniques 28: 1102-4 (2000)).

[0402] In one aspect, the invention provides polynucleotides which encode a multivalent CD20-binding molecule of the present invention (e.g. a multivalent CD20-binding protein of the present invention), or a component, fragment or derivative thereof. The polynucleotides may include, e.g., a nucleic acid sequence encoding a polypeptide at least 50%, 55%, 60%, 65%, 70%, 75%, 80%, 85%, 90%, 95%, 99% or more, identical to a polypeptide comprising one of the amino acid sequences of all or part of a multivalent CD20-binding molecule of the present invention. The invention also includes polynucleotides comprising nucleotide sequences that hybridize under stringent conditions to a polynucleotide which encodes all or part of a multivalent CD20-binding molecule of the present invention, or a fragment or derivative thereof, or the antisense or complement of any such sequence.

[0403] Derivatives or analogs of the polynucleotides (or multivalent CD20-binding proteins) of the invention include, inter alia, polynucleotide (or polypeptide) molecules having regions that are substantially homologous to the polynucleotides or multivalent CD20-binding proteins of the invention, e.g. by at least about 45%, 50%, 70%, 80%, 95%, 98%, or even 99% identity (with a preferred identity of 80-99%) over a polynucleotide or polypeptide sequence of the same size or when compared to an aligned sequence in which the alignment is done by a computer homology program known in the art. An exemplary program is the GAP program (Wisconsin Sequence Analysis Package, Version 8 for UNIX, Genetics Computer Group, University Research Park, Madison, Wis., U.S.) using the default settings, which uses the algorithm of Smith T, Waterman M, Adv Appl Math 2: 482-9 (1981). Also included are polynucleotides capable of hybridizing to the complement of a sequence encoding the multivalent CD20-binding proteins of the invention under stringent conditions (see e.g. Ausubel F et al., Current Protocols in Molecular Biology (John Wiley & Sons, New York, N.Y., U.S., 1993)), and below. Stringent conditions are known to those skilled in the art and may be found, e.g., in Current Protocols in Molecular Biology (John Wiley & Sons, NY, U.S., Ch. Sec. 6.3.1-6.3.6 (1989)).

[0404] The present invention further provides expression vectors that comprise the polynucleotides within the scope of the present invention. The polynucleotides capable of encoding the multivalent CD20-binding proteins of the invention may be inserted into known vectors, including bacterial plasmids, viral vectors and phage vectors, using material and methods well known in the art to produce expression vectors. Such expression vectors will include the polynucleotides necessary to support production of contemplated multivalent CD20-binding proteins of the invention within any host cell of choice or cell-free expression systems (e.g., pTxb1 and pIVEX2.3). The specific polynucleotides comprising expression vectors for use with specific types of host cells or cell-free expression systems are well known to one of ordinary skill in the art, can be determined using routine experimentation, or may be purchased.

[0405] The term “expression vector,” as used herein, refers to a polynucleotide, linear or circular, comprising one or more expression units. The term “expression unit” denotes a polynucleotide segment encoding a polypeptide of interest and capable of providing expression of the nucleic acid segment in a host cell. An expression unit typically comprises a transcription promoter, an open reading frame encoding the polypeptide of interest, and a transcription terminator, all in operable configuration. An expression vector contains one or more expression units. Thus, in the context of the present invention, an expression vector encoding a protein comprising a single polypeptide chain (e.g. a scFv genetically recombined with a Shiga toxin effector region) includes at least an expression unit for the single polypeptide chain, whereas a protein comprising, e.g. two or more polypeptide chains (e.g. one chain comprising a V_{L} domain and a second chain comprising a V_{H} domain linked to a toxin effector region) includes at least two expression units, one for each of the two polypeptide chains of the protein. For expression of multi-chain proteins of the invention, an expression unit for each polypeptide chain may also be separately contained on different expression vectors (e.g. expression may be achieved with a single host cell into which expression vectors for each polypeptide chain has been introduced).

[0406] Expression vectors capable of directing transient or stable expression of polypeptides and proteins are well known in the art. The expression vectors generally include, but are not limited to, one or more of the following: a heterologous signal sequence or peptide, an origin of replication, one or more marker genes, an enhancer element, a promoter, and a transcription termination sequence, each of which is well known in the art. Optional regulatory control sequences, integration sequences, and useful markers that can be employed are known in the art.

[0407] The term “host cell” refers to a cell which can support the replication or expression of the expression vector. Host cells may be prokaryotic cells, such as E. coli or eukaryotic cells (e.g. yeast, insect, amphibian, bird, or mammalian cells). Creation and isolation of host cell lines comprising a polynucleotide of the invention or capable of producing a multivalent CD20-binding protein of the invention may be accomplished using standard techniques known in the art.

[0408] Molecules and compositions within the scope of the present invention may comprise variants or derivatives of the multivalent CD20-binding molecules described herein that are produced by modifying the polynucleotide encoding a proteinaceous component of a multivalent CD20-binding molecule of the invention and/or a multivalent CD20-binding protein of the invention by altering one or more amino acids or deleting or inserting one or more amino acids that may render it more suitable to achieve desired properties, such as more optimal expression by a host cell.

### IX. Delivery Devices and Kits

[0409] In certain embodiments, the invention relates to a device comprising one or more compositions of matter of the present invention, such as, e.g., a pharmaceutical composition, for delivery to a subject in need thereof. Thus, a delivery device comprising one or more proteinaceous compositions of the present invention (e.g. a multivalent CD20-binding molecule of the present invention) may be used to administer to a patient a composition of matter of the invention by various delivery methods, including: intravenous, subcutaneous, intramuscular or intraperitoneal injection; oral administration; transdermal administration; pulmonary or transmucosal administration; administration by implant, osmotic pump, cartridge or micro pump; or by other means recognized by a person of skill in the art.

[0410] Also within the scope of the present invention are kits comprising at least one composition of matter of the invention, and optionally, packaging and instructions for use. Kits may be useful for drug administration and/or diagnostic information gathering. A kit of the invention may optionally comprise at least one additional reagent (e.g. standards, markers and the like). Kits typically include a label indicating the intended use of the contents of the kit. The kit may further comprise reagents and other tools for detecting a cell type (e.g. a tumor cell) in a sample or in a subject, or for diagnosing whether a patient belongs to a group that responds to a therapeutic strategy which makes use of a multivalent CD20-binding molecule, composition, or related method of the present invention as described herein.

### X. Exemplary Methods for Using Compositions of Matter of the Present Invention

[0411] Generally, it is an object of the invention to provide pharmacologically active agents, as well as compositions comprising the same, that can be used in the prevention and/or treatment of diseases, disorders, and conditions, such as certain cancers, tumors, growth abnormalities, immune disorders, or further pathological conditions mentioned herein. Accordingly, the present invention provides methods of using the multivalent CD20-binding molecules of the present, solvates of the present invention, salts of the present invention, and compositions of any of the aforementioned, such as pharmaceutical compositions of the invention, for the targeted killing of CD20 expressing cells, for delivering additional exogenous materials into certain CD20 expressing cells, for labeling of the interiors of certain CD20 expressing cells, for collecting diagnostic information, and for treating various diseases, disorders, and conditions as described herein.

[0412] In particular, it is an object of the invention to provide such pharmacologically active agents, compositions, and/or methods that have certain advantages compared to the agents, compositions, and/or methods that are currently known in the art. Accordingly, the present invention provides methods of using multivalent CD20-binding molecules of the present invention, and compositions thereof, characterized by specified proteinaceous components. For example, any of the molecules shown in SEQ ID NOs: 1-304 may be specifically utilized as a component of the multivalent CD20-binding molecule or composition used in the following methods.

[0413] The present invention provides methods of killing a cell comprising the step of contacting the cell, either in vitro or in vivo, with a multivalent CD20-binding molecule, and/or composition thereof. The multivalent CD20-binding molecule of the present invention, and compositions thereof, can be used to kill a specific cell type upon contacting a cell or cells with one of the claimed compositions of matter. In certain embodiments, a multivalent CD20-binding molecule of the present invention and/or a composition thereof can be used to kill specific CD20+ cell types in a mixture of different cell types, such as mixtures comprising CD20+ cancer, tumor, hematologic, immune, and/or infected cells.

[0414] The present invention provides methods of killing cell(s), the method comprising the step of contacting a cell(s), with a multivalent CD20-binding molecule of the present invention, a multivalent CD20-binding molecule composition of the present invention, a solvate of the present invention, a salt of the present invention, and/or a pharmaceutical composition of the present invention; wherein the cell(s) is physically coupled with a CD20 having the extracellular part bound by the two or more binding regions of the multivalent CD20-binding molecule or a multivalent CD20-binding molecule of a composition of the present invention. For certain embodiments, the step of contacting the cell(s) occurs in vitro. For certain other embodiments, the step of contacting the cell(s) occurs in vivo. For certain further embodiments, the cell(s) express at a cellular surface the CD20 which (1) have the extracellular part bound by the two or more CD20 binding regions of the multivalent CD20-binding molecule, (2) have a transmembrane domain, and (3) remain physically coupled to the cell. For certain further embodiments, the cell(s) is CD20 positive cells. For certain embodiments, the cell(s) is physically coupled with a significant amount of extracellular CD20 which (1) have the extracellular part bound by the two or more CD20 binding regions of the multivalent CD20-binding molecule. For certain embodiments, the cell(s) are descendants or members of a B-cell lineage. For certain embodiments, the cell(s) is selected from the group consisting of: malignant B-cell, B-cell leukemia cell, B-cell lymphoma cell, B-cell myeloma cell, acute myeloid leukemia cell, acute non-lymphocytic leukemia cell, B-cell chronic lymphocytic leukemia cell, B-cell lymphoma cell, B-cell non-Hodgkin's lymphoma cell, B-cell precursor acute lymphoblastic leukemia cell, B-cell prolymphocytic leukemia cell, Burkitt's lymphoma cell, chronic lymphocytic leukemia cell, chronic myeloid leukemia cell, diffuse large B-cell lymphoma cell, follicular lymphoma cell, hairy cell leukemia cell, Hodgkin's lymphoma cell, immunoblastic large cell lymphoma cell, mantle cell lymphoma cell, melanoma cell, multiple myeloma cell, neoplastic plasma cell, nodular lymphocyte predominant Hodgkin's lymphoma cell, non-Hodgkin's lymphoma cell, plasmablastic lymphoma cell, plasma cell myeloma cell, precursor B-lymphoblastic lymphoma cell, small lymphocytic lymphoma cell, malignant T-cell, T-cell leukemia cell, T-cell lymphoma cell, T-cell large granular lymphocyte leukemia cell, T-cell prolymphocytic leukemia, healthy B-cell lineage cell, and/or healthy T-cell.

[0415] The multivalent CD20-binding molecule of the present invention, and compositions thereof, have varied applications, including, e.g., uses in depleting unwanted CD20+ cell types from tissues either in vitro or in vivo, uses in modulating immune responses to treat graft-versus-host disease, and uses in purging transplantation tissues of unwanted CD20+ cell types. In certain embodiments, a multivalent CD20-binding molecule of the present invention and/or a composition thereof can be used to kill CD20+ cancer cells in a mixture of different cell types. In certain embodiments, a multivalent CD20-binding molecule of the present invention and/or a composition thereof can be used to kill specific CD20+ cell types in a mixture of different cell types, such as cells in pre-transplantation tissues. In certain embodiments, a multivalent CD20-binding molecule of the present invention and/or a composition thereof can be used to kill specific CD20+ cell types in a mixture of cell types, such as cells in pre-administration tissue material for therapeutic purposes.

[0416] In certain embodiments, a multivalent CD20-binding molecule of the present invention and/or a composition thereof, alone or in combination with other compounds or pharmaceutical compositions, can show potent cell-kill activity when administered to a population of cells in vitro or in vivo in a subject, such as, e.g., in a patient in need of treatment. By targeting the delivery of enzymatically active Shiga toxin regions using high-affinity binding regions to CD20, this potent cell-kill activity can be restricted to specifically and selectively kill certain cell types within an organism, such as certain CD20 positive cancer cells, neoplastic cells, malignant tumor cells, non-malignant tumor cells, and/or immune cells.

[0417] In humans, CD20 is expressed by normal, B-cell lineage cells within certain cell developmental stages as well as numerous mature B-cell neoplasms, such as in NHL and CLL. In addition, CD20 is expressed by mature T-cell and NK-cell neoplasms. CD20 is expressed by a subset of normal T-cells as well as malignant T-cells such as in T-cell lymphomas (TCLs), including mycosis fungoides (MF), natural killer cell lymphoma (NK-cell lymphoma), peripheral T-cell lymphomas (PTCLs), and cutaneous T-cell lymphomas. CD20 is expressed by malignant T-cells in T-cell large granular lymphocyte leukemia (T-LGLL).

[0418] The present invention provides a method of killing a CD20+ cell in a patient in need thereof, the method comprising the step of administering to the patient at least one multivalent CD20-binding molecule of the present invention or a composition thereof, such as, e.g., a pharmaceutical composition comprising a multivalent CD20-binding molecule of the present invention.

[0419] In certain embodiments, the multivalent CD20-binding molecule of the present invention and/or a composition thereof is useful for killing malignant cells which express elevated levels of CD20 at a cellular surface. The multivalent CD20-binding molecule of the present invention and/or a composition thereof is particularly useful for killing neoplastic cells which express elevated levels of CD20 at a cellular surface.

[0420] Certain embodiments of the multivalent CD20-binding molecule of the present invention and/or a composition thereof can be used to kill a CD20-expressing cancer and/or tumor cell in a patient, such as, e.g. B-cell or T-cell cancers. The term “cancer cell” or “cancerous cell” refers to various neoplastic cells which grow and divide in an abnormally accelerated and/or unregulated fashion and will be clear to the skilled person. The term “tumor cell” includes both malignant and non-malignant cells (e.g. non-cancerous, benign tumor cells and non-cancerous “cancer” stem cells, tumor stem cells, pre-malignant cancer-initiating cells, tumor-initiating cells, or tumorigenic cells—all of which can give rise to daughter cells which become malignant tumor and/or cancer cells but are unable to metastasize on their own (see e.g. Martinez-Climent J et al., Haematologica 95: 293-302 (2010)). Generally, cancers and/or tumors can be defined as diseases, disorders, or conditions that are amenable to treatment and/or prevention. Neoplastic cells are often associated with one or more of the following: unregulated growth, lack of differentiation, local tissue invasion, angiogenesis, and metastasis. The cancers and tumors (either malignant or non-malignant) which are comprised of cancer cells and/or tumor cells which may benefit from methods and compositions of the invention will be clear to the skilled person. The present invention may be used to kill cancer stem cells, tumor stem cells, pre-malignant cancer-initiating cells, and tumor-initiating cells which commonly are slow dividing and resistant to cancer therapies like chemotherapy and radiation. For example, the following non-limiting examples of conditions involving cells with limited malignant potential may be diagnosed and/or treated using multivalent CD20-binding molecules of the present invention: monoclonal B-cell lymphocytosis (MBL), localized follicular lymphoma (localized FL), gastric extranodal marginal zone (MALT) lymphomas, and intrafollicular neoplasia (Limpens J et al., Oncogene 6: 2271-6 (1991); Liu H et al., Lancet 357: 39-40 (2001); Richard P et al., J Clin Pathol 59: 995-6 (2006); Roulland S et al., J Exp Med 203: 2425-31 (2006); Marti G et al., Br J Haematol 139:701-8 (2007); Awl N et al., Histopathology 52: 256-60 (2008); Rawstron A et al., N Engl J Med 359: 575-83 (2008)). Similarly, cancer initiating cells and/or cancer stem cells may be detected and/or treated using multivalent CD20-binding molecules of the invention, such as, e.g., acute myeloid leukemia (AML) stem cells, B-cell non-Hodgkin's lymphoma (B-cell NHL) initiating cells, chronic myeloid leukemia (CML) stem cells, Hodgkin's lymphoma (HL or HD) stem-like cells, and mantle cell lymphoma (MCL) initiating cells (see e.g. Hope K et al., Nat Immunol 5: 738-43 (2004); Wang J, Dick J, Trends Cell Biol 15: 494-501 (2005); Ishikawa F et al., Nat Biotechnol 25: 1315-21 (2007); Jones R et al., Blood 113: 5920-6 (2009); Chen Z et al., Stem Cell Res 5: 212-225 (2010); Chomel J et al., Blood 118: 3657-60 (2011); Druker B, J Clin Invest 121: 396-409 (2011); Gerber J et al., Blood 119: 3571-7 (2012)).

[0421] Certain embodiments of the multivalent CD20-binding molecule of the present invention and/or a composition thereof can be used to kill an immune cell (whether healthy or malignant) in a patient by targeting an extracellular part of CD20 found physically coupled with the immune cell. Certain embodiments of the multivalent CD20-binding molecules of the invention, and compositions thereof, may be used to kill a healthy CD20+ immune cell(s) in a patient. CD20 is expressed by normal, B-cell lineage cells within certain cell developmental stages (van Meerten T et al., Clin Cancer Res 12: 4027-35 (2006)). CD20 is expressed by a subset of normal T-cells (Martin B et al., J Cutan Pathol 38: 663-9 (2011)).

[0422] It is within the scope of the present invention to utilize the multivalent CD20-binding molecule of the present invention and/or a composition thereof for the purposes of purging patient cell populations (e.g. bone marrow) of malignant, neoplastic, or otherwise unwanted B-cells and/or T-cells and then reinfusing the B-cell and/or T-cell depleted material into the patient.

[0423] It is within the scope of the present invention to utilize the multivalent CD20-binding molecule of the present invention and/or a composition thereof for the purposes of ex vivo depletion of B-cells and/or T-cells from isolated cell populations removed from a patient. In one non-limiting example, the multivalent CD20-binding molecule of the present invention and/or a composition thereof may be used in a method for prophylaxis of organ and/or tissue transplant rejection wherein the donor organ or tissue is perfused prior to transplant with a cytotoxic multivalent CD20-binding molecule of the present invention and/or a composition thereof in order to purge the organ of unwanted donor B-cells and/or T-cells.

[0424] It is also within the scope of the present invention to utilize the multivalent CD20-binding molecule of the present invention and/or a composition thereof for the purposes of depleting B-cells and/or T-cells from a donor cell population as a prophylaxis against graft-versus-host disease, and induction of tolerance, in a patient to undergo a bone marrow and or stem cell transplant.

[0425] It is within the scope of the present invention to provide a bone marrow recipient for prophylaxis or treatment of host-versus-graft disease via the targeted cell-killing of host B-cells and/or T-cells using multivalent CD20-binding molecule of the present invention and/or a composition thereof (see e.g. Sarantopoulos S et al., Biol Blood Marrow Transplant 21: 16-23 (2015)).

[0426] Additionally, the present invention provides a method of treating a disease, disorder, or condition in a patient comprising the step of administering to a patient in need thereof a therapeutically effective amount of at least one of the multivalent CD20-binding molecule of the present invention and/or composition thereof. Contemplated diseases, disorders, and conditions that can be treated using this method include cancers, malignant tumors, non-malignant tumors, growth abnormalities, and immune disorders. Administration of a “therapeutically effective dosage” of a composition of the invention may result in a decrease in severity of disease symptoms, an increase in frequency and duration of disease symptom-free periods, or a prevention of impairment or disability due to the disease affliction.

[0427] The therapeutically effective amount of a composition of the present invention will depend on the route of administration, the type of mammal being treated, and the physical characteristics of the specific patient under consideration. These factors and their relationship to determining this amount are well known to skilled practitioners in the medical arts. This amount and the method of administration can be tailored to achieve optimal efficacy, and may depend on such factors as weight, diet, concurrent medication and other factors, well known to those skilled in the medical arts. The dosage sizes and dosing regimen most appropriate for human use may be guided by the results obtained by the present invention, and may be confirmed in properly designed clinical trials. An effective dosage and treatment protocol may be determined by conventional means, starting with a low dose in laboratory animals and then increasing the dosage while monitoring the effects, and systematically varying the dosage regimen as well. Numerous factors may be taken into consideration by a clinician when determining an optimal dosage for a given subject. Such considerations are known to the skilled person.

[0428] An acceptable route of administration may refer to any administration pathway known in the art, including but not limited to aerosol, enteral, nasal, ophthalmic, oral, parenteral, rectal, vaginal, or transdermal (e.g. topical administration of a cream, gel or ointment, or by means of a transdermal patch). “Parenteral administration” is typically associated with injection at or in communication with the intended site of action, including infraorbital, infusion, intraarterial, intracapsular, intracardiac, intradermal, intramuscular, intraperitoneal, intrapulmonary, intraspinal, intrasternal, intrathecal, intrauterine, intravenous, subarachnoid, subcapsular, subcutaneous, transmucosal, or transtracheal administration.

[0429] For administration of a pharmaceutical composition of the invention, the dosage range will generally be from about 0.0001 to 100 milligrams per kilogram (mg/kg), and more, usually 0.01 to 5 mg/kg, of the subject's body weight. Exemplary dosages may be 0.25 mg/kg body weight, 1 mg/kg body weight, 3 mg/kg body weight, 5 mg/kg body weight or 10 mg/kg body weight or within the range of 1-10 mg/kg. For certain embodiments of the pharmaceutical composition of the present invention, the dosage range for administration of the pharmaceutical composition will generally be from about 0.0001 to 1 milligram per kilogram (mg/kg), and more usually 0.005 to 0.5 mg/kg, of the subject's body weight. Exemplary dosages may be 0.01 mg/kg body weight, 0.015 mg/kg body weight, 0.05 mg/kg body weight, 0.085 mg/kg body weight or 0.1 mg/kg body weight or within the range of 0.01-0.1 mg/kg. An exemplary treatment regime is a once or twice daily administration, or a once or twice weekly administration, once every two weeks, once every three weeks, once every four weeks, once a month, once every two or three months or once every three to 6 months. Dosages may be selected and readjusted by the skilled health care professional as required to maximize therapeutic benefit for a particular patient.

[0430] A multivalent CD20-binding molecule of the present invention and/or a composition thereof will typically be administered to the same patient on multiple occasions. Intervals between single doses can be, for example, 1-4 days, weekly, monthly, every two or three months, every six months, or yearly. Intervals between administrations can also be irregular, based on regulating blood levels of the active compound or based on other markers, indications, or signs present in the subject or patient. Dosage regimens for a compound of the invention (e.g. a multivalent CD20-binding molecule composition of the present invention) include intravenous administration of 1 mg/kg body weight or 3 mg/kg body weight with the compound administered every two to four weeks for six doses, then every three months at 3 mg/kg body weight or 1 mg/kg body weight.

[0431] A multivalent CD20-binding molecule of the present invention and/or a composition thereof may be administered via one or more routes of administration, using one or more of a variety of methods known in the art. As will be appreciated by the skilled worker, the route and/or mode of administration will vary depending upon the desired results. Routes of administration for multivalent CD20-binding molecule compositions, pharmaceutical compositions, and diagnostic compositions of the present invention include, e.g. intravenous, intramuscular, intradermal, intraperitoneal, subcutaneous, spinal, or other parenteral routes of administration, for example by injection or infusion. In other embodiments, a multivalent CD20-binding molecule of the present invention and/or a composition thereof may be administered by a non-parenteral route, such as a topical, epidermal or mucosal route of administration, for example, intranasally, orally, vaginally, rectally, sublingually, or topically.

[0432] For certain embodiments of the methods of the present invention, the administering step involves a parenteral administration of a multivalent CD20-binding molecule of the present invention and/or a composition thereof (e.g. a pharmaceutical composition of the present invention). For certain further embodiments, the administering step involves an intravenous administration of a multivalent CD20-binding molecule of the present invention and/or a composition thereof (e.g. a pharmaceutical composition of the present invention).

[0433] For certain embodiments of the methods of the present invention, the method comprises the step of diluting a pharmaceutical composition of the present invention in an aqueous solution, sterile water, dextrose solution, dextrose monohydrate, hydrous dextrose, saline solution, and/or sodium chloride solution prior to the administering step.

[0434] Therapeutic multivalent CD20-binding molecule of the present invention and/or a composition thereof may be administered with one or more of a variety of medical devices known in the art. For example, in one embodiment, a pharmaceutical composition of the invention may be administered with a needleless hypodermic injection device. Examples of well-known implants and modules useful in the present invention are in the art, including e.g., implantable micro-infusion pumps for controlled rate delivery; devices for administering through the skin; infusion pumps for delivery at a precise infusion rate; variable flow implantable infusion devices for continuous drug delivery; and osmotic drug delivery systems. These and other such implants, delivery systems, and modules are known to those skilled in the art.

[0435] A multivalent CD20-binding molecule of the present invention and/or a composition thereof may be administered alone or in combination with one or more other therapeutic or diagnostic agents. A combination therapy may include a multivalent CD20-binding molecule of the present invention and/or a pharmaceutical composition thereof combined with at least one other therapeutic agent selected based on the particular patient, disease or condition to be treated. Examples of other such agents include, inter alia, a cytotoxic, anti-cancer or chemotherapeutic agent, an anti-inflammatory or anti-proliferative agent, an antimicrobial or antiviral agent, growth factors, cytokines, an analgesic, a therapeutically active small molecule or polypeptide, a single chain antibody, a classical antibody or fragment thereof, or a nucleic acid molecule which modulates one or more signaling pathways, and similar modulating therapeutics which may complement or otherwise be beneficial in a therapeutic or prophylactic treatment regimen.

[0436] Treatment of a patient with a multivalent CD20-binding molecule of the present invention and/or a composition thereof preferably leads to cell death of targeted CD20+ cells and/or the inhibition of growth of targeted CD20+ cells. As such, certain multivalent CD20-binding molecules of the present invention, and pharmaceutical compositions comprising them, will be useful in methods for treating a variety of pathological disorders in which killing or depleting CD20+ target cells may be beneficial, such as, inter alia, cancers, tumors, immune disorders, and growth abnormalities involving CD20+ cells. The present invention provides methods for suppressing cell proliferation, and treating cell disorders, including neoplasia, overactive B-cells, and overactive T-cells.

[0437] CD20 is expressed by cells involved in a variety of malignancies, such as, e.g., hematologic diseases, rheumatic diseases, hematologic cancers, leukemias, lymphomas, melanomas, myelomas, B-cell lymphomas, B-cell non-Hodgkins lymphomas (B-cell NHL), Burkitt's lymphomas (BL), B-cell chronic lymphocytic leukemias (B-cell CLL), chronic lymphocytic leukemias (CLL), diffuse large B-cell lymphomas (DLBCL or DLBL), follicular lymphomas (FL), hairy cell leukemias (HCL), Hodgkins lymphomas (HD), immunoblastic large cell lymphomas, mantle cell lymphomas (MCL), melanomas, non-Hodgkins lymphomas (NHL), precursor B-lymphoblastic lymphomas (B-LBL), small lymphocytic lymphoma (SLL), and T-cell lymphomas (TCL), amyloidosis, ankylosing spondylitis, asthma, Crohn's disease, diabetes, graft rejection, graft-versus-host disease, Hashimoto's thyroiditis, hemolytic uremic syndrome, HIV-related diseases, lupus erythematosus, multiple sclerosis, polyarteritis nodosa, polyarthritis, psoriasis, psoriatic arthritis, rheumatoid arthritis, scleroderma, septic shock, Sjörgren's syndrome, ulcerative colitis, and/or vasculitis.

[0438] In certain embodiments, multivalent CD20-binding molecule of the present invention and/or a composition thereof can be used to treat or prevent cancers, tumors (malignant and non-malignant), growth abnormalities, and immune disorders. In a further aspect, the above ex vivo method can be combined with the above in vivo method to provide methods of treating or preventing rejection in bone marrow transplant recipients, and for achieving immunological tolerance.

[0439] In certain embodiments, the present invention provides methods for treating malignancies or neoplasms and other blood cell associated cancers in a mammalian subject, such as a human, the method comprising the step of administering to a subject in need thereof a therapeutically effective amount of a multivalent CD20-binding molecule of the present invention and/or a composition thereof.

[0440] The multivalent CD20-binding molecule of the present invention and/or a composition thereof have varied applications, including, e.g., uses in removing unwanted B-cells and/or T-cells, uses in modulating immune responses to treat graft-versus-host disease, uses as antiviral agents, uses as antimicrobial agents, and uses in purging transplantation tissues of unwanted cell types. The multivalent CD20-binding molecule of the present invention and/or a composition thereof are commonly anti-neoplastic agents—meaning they are capable of treating and/or preventing the development, maturation, or spread of neoplastic or malignant cells by inhibiting the growth and/or causing the death of CD20+ cancer, neoplastic, or tumor cells.

[0441] In certain embodiments, a multivalent CD20-binding molecule of the present invention and/or a composition thereof is used to treat a B-cell-, plasma cell-, T-cell- or antibody-mediated disease or disorder, such as for example hematologic diseases, rheumatic diseases, hematologic cancers, leukemias, lymphomas, melanomas, myelomas, B-cell lymphomas, B-cell non-Hodgkins lymphomas (B-cell NHL), Burkitt's lymphomas (BL), B-cell chronic lymphocytic leukemias (B-cell CLL), chronic lymphocytic leukemias (CLL), diffuse large B-cell lymphomas (DLBCL or DLBL), follicular lymphomas (FL), hairy cell leukemias (HCL), Hodgkins lymphomas (HD), immunoblastic large cell lymphomas, mantle cell lymphomas (MCL), melanomas, non-Hodgkins lymphomas (NHL), precursor B-lymphoblastic lymphomas (B-LBL), small lymphocytic lymphoma (SLL), and T-cell lymphomas (TCL), amyloidosis, ankylosing spondylitis, asthma, Crohn's disease, diabetes, graft rejection, graft-versus-host disease, Hashimoto's thyroiditis, hemolytic uremic syndrome, HIV-related diseases, lupus erythematosus, multiple sclerosis, polyarteritis nodosa, polyarthritis, psoriasis, psoriatic arthritis, rheumatoid arthritis, scleroderma, septic shock, Sjörgren's syndrome, ulcerative colitis, and/or vasculitis.

[0442] It is within the scope of the present invention to provide a prophylaxis or treatment for diseases or conditions mediated by B-cells and/or T-cells by administering the multivalent CD20-binding molecule of the present invention and/or a composition thereof, to a patient for the purpose of killing B-cells and/or T-cells in the patient. This usage is compatible with preparing or conditioning a patient for bone marrow transplantation, stem cell transplantation, tissue transplantation, or organ transplantation, regardless of the source of the transplanted material, e.g., human or non-human sources.

[0443] It is within the scope of the present invention to provide a bone marrow recipient for prophylaxis or treatment of host-versus-graft disease via the targeted CD20+ cell-killing of host T-cells using a multivalent CD20-binding molecule of the present invention and/or a composition thereof.

[0444] The multivalent CD20-binding molecule of the present invention and/or a composition thereof may be utilized in a method of treating cancer comprising administering to a patient, in need thereof, a therapeutically effective amount of the protein composition or a pharmaceutical composition of the present invention. For certain embodiments of the methods of the present invention, the condition, disease, or disorder being treated is related to hematologic diseases, rheumatic diseases, hematologic cancers, leukemias, lymphomas, melanomas, myelomas, B-cell lymphomas, B-cell non-Hodgkins lymphomas (B-cell NHL), Burkitt's lymphomas (BL), B-cell chronic lymphocytic leukemias (B-cell CLL), chronic lymphocytic leukemias (CLL), diffuse large B-cell lymphomas (DLBCL or DLBL), follicular lymphomas (FL), hairy cell leukemias (HCL), Hodgkins lymphomas (HD), immunoblastic large cell lymphomas, mantle cell lymphomas (MCL), melanomas, non-Hodgkins lymphomas (NHL), precursor B-lymphoblastic lymphomas (B-LBL), small lymphocytic lymphoma (SLL), and T-cell lymphomas (TCL), amyloidosis, ankylosing spondylitis, asthma, Crohn's disease, diabetes, graft rejection, graft-versus-host disease, Hashimoto's thyroiditis, hemolytic uremic syndrome, HIV-related diseases, lupus erythematosus, multiple sclerosis, polyarteritis nodosa, polyarthritis, psoriasis, psoriatic arthritis, rheumatoid arthritis, scleroderma, septic shock, Sjörgren's syndrome, ulcerative colitis, and/or vasculitis.

[0445] Non-limiting examples of subtypes of hematologic cancers (e.g. leukemias, lymphomas, and myelomas) that may be treated with the multivalent CD20-binding molecules and compositions of the present invention include acute myeloid leukemias (acute myelogenous leukemia or AML), acute non-lymphocytic leukemias, B-cell lymphomas, B-cell non-Hodgkin's lymphomas (B-cell NHL), B-cell acute lymphoblastic leukemias (B-ALL or BCP-ALL), B-cell prolymphocytic leukemias (B-PLL), B-lymphoblastic lymphomas (B-LBL), Burkitt's lymphomas (BL), atypical Burkitt's lymphomas (atypical BL), chronic lymphocytic leukemias (CLL), chronic myeloid leukemias (CML), cutaneous B-cell lymphomas (CBCL), diffuse large B-cell lymphomas (DLBCL or DLBL), follicular lymphomas (FL), hairy cell leukemias (HCL), heavy chain diseases, Hodgkin's lymphomas (HL or HD), immunoblastic large cell lymphomas, granulomatosis (LG or LYG), lymphoplasmacytic lymphomas, mantle cell lymphomas (MCL), marginal zone lymphomas (MZL), multiple myelomas (MM), nodular lymphocyte predominant Hodgkin's lymphomas (NLPHL), non-Hodgkin's lymphomas (NHL), plasmablastic lymphomas (PBL), plasmablastic lymphomas associated with multicentric Castleman disease, plasma cell neoplasmas, plasma cell myelomas, primary effusion lymphomas (PEL), small lymphocytic lymphomas (SLL), T-cell large granular lymphocyte leukemias (T-LGLL), T-cell lymphomas (TCL), peripheral T-cell lymphomas (PTCL), T-cell prolymphocytic leukemias (T-PLL), mycosis fungiodes (MF), and Waldenström's macroglobulinemias (WM).

[0446] The multivalent CD20-binding molecule of the present invention and/or a composition thereof may be utilized in a method of treating an immune disorder comprising administering to a patient, in need thereof, a therapeutically effective amount of the multivalent CD20-binding molecule of the present invention and/or a composition thereof. For certain embodiments of the methods of the present invention, the immune disorder is related to an inflammation associated with a disease selected from the group consisting of: amyloidosis, ankylosing spondylitis, asthma, Crohn's disease, diabetes, graft rejection, graft-versus-host disease, Graves' disease, Graves' ophthalmopathy, Hashimoto's thyroiditis, heavy chain disease, hemolytic uremic syndrome, HIV-related diseases, lupus erythematosus, multiple sclerosis, neuromyelitis optica spectrum disorders, N-methyl D-aspartate (NMDA) receptor encephalitis, opsoclonus myoclonus syndrome (OMS), paroxysmal nocturnal hemoglobinuria, polyarteritis nodosa, polyarthritis, psoriasis, psoriatic arthritis, rheumatoid arthritis, scleritis, scleroderma, septic shock, Sjörgren's syndrome, ulcerative colitis, and vasculitis.

[0447] Among certain embodiments of the present invention is using the multivalent CD20-binding molecule of the present invention and/or a composition thereof or a solvate or salt of the present invention as a component of a pharmaceutical composition or medicament for the treatment or prevention of a cancer, tumor, immune disorder, and/or growth abnormality involving a CD20+ cell. For example, immune disorders presenting on the skin of a patient may be treated with such a medicament in efforts to reduce inflammation. In another example, skin tumors may be treated with such a medicament in efforts to reduce tumor size or eliminate the tumor completely.

[0448] For certain cancers, depletion and/or inhibition of B-cells generally may improve disease outcomes, such as, e.g. by depleting cancer escape promoting regulatory B-cells (see e.g. Olkhanud P et al., Cancer Res 69: 5996-6004 (2009); Olkhanud P et al., Cancer Res 71: 3505-15 (2011)).

[0449] Among certain embodiments of the present invention are methods of inducing cellular internalization of a multivalent CD20-binding molecule into a cell(s) and/or internalizing a cell surface localized CD20 bound by a multivalent CD20-binding molecule of the present invention, the method comprising the step of contacting the cell(s) with a multivalent CD20-binding molecule of the present invention, a multivalent CD20-binding molecule composition of the present invention, a solvate of the present invention, a salt of the present invention, a pharmaceutical composition of the present invention, and/or a diagnostic composition of the present invention. For certain embodiments of this inducing internalization method, the cell(s) is physically coupled with CD20, which have the extracellular part bound by two or more CD20 binding regions of the multivalent CD20-binding molecule. For certain further embodiments of the inducing cellular internalization method, the step of contacting the cell(s) occurs in vitro. For certain other embodiments, the step of contacting the cell(s) occurs in vivo, such as, e.g., within a patient. For certain further embodiments of the inducing cellular internalization method, the cellular internalization of the multivalent CD20-binding molecule occurs in about five hours, four hours, three hours, two hours, one hour, thirty minutes, or less at a physiological temperature appropriate for the cell and/or at about 37 degrees Celsius. For certain further embodiments, the cell expresses at a cellular surface the CD20 which (1) have the extracellular part bound by the two or more CD20 binding regions of the multivalent CD20-binding molecule, (2) have a transmembrane domain, and (3) remain physically coupled to the cell. For certain further embodiments, the cell is a CD20 positive cell. For certain embodiments, the cell is physically coupled with a significant amount of extracellular CD20 which (1) have the extracellular part bound by the two or more CD20 binding regions of the multivalent CD20-binding molecule. For certain embodiments, the cell is a descendant or member of a B-cell lineage. For certain embodiments, the cell is selected from the group consisting of: malignant B-cell, B-cell leukemia cell, B-cell lymphoma cell, B-cell myeloma cell, acute myeloid leukemia cell, acute non-lymphocytic leukemia cell, B-cell chronic lymphocytic leukemia cell, B-cell lymphoma cell, B-cell non-Hodgkin's lymphoma cell, B-cell precursor acute lymphoblastic leukemia cell, B-cell prolymphocytic leukemia cell, Burkitt's lymphoma cell, chronic lymphocytic leukemia cell, chronic myeloid leukemia cell, diffuse large B-cell lymphoma cell, follicular lymphoma cell, hairy cell leukemia cell, Hodgkin's lymphoma cell, immunoblastic large cell lymphoma cell, mantle cell lymphoma cell, melanoma cell, multiple myeloma cell, neoplastic plasma cell, nodular lymphocyte predominant Hodgkin's lymphoma cell, non-Hodgkin's lymphoma cell, plasmablastic lymphoma cell, plasma cell myeloma cell, precursor B-lymphoblastic lymphoma cell, small lymphocytic lymphoma cell, malignant T-cell, T-cell leukemia cell, T-cell lymphoma cell, T-cell large granular lymphocyte leukemia cell, T-cell prolymphocytic leukemia, healthy B-cell lineage cell, and/or healthy T-cell.

[0450] For certain embodiments, the methods of the present invention provide a method of inducing cellular internalization of a cell surface localized CD20 bound by a multivalent CD20-binding molecule in a patient, the method comprising the step of administering to the patient a multivalent CD20-binding molecule of the present invention, a solvate of the present invention, a salt of the present invention, a multivalent CD20-binding molecule composition of the present invention, pharmaceutical composition of the present invention, and/or a diagnostic composition of the present invention.

[0451] Additionally, the present invention provides methods for delivering an exogenous material to the inside of a cell, the method comprising the step of contacting the cell(s), either in vitro or in vivo, with a multivalent CD20-binding molecule of the present invention which comprises an additional exogenous material, a multivalent CD20-binding molecule composition of the present invention comprising a multivalent CD20-binding molecule of the present invention which comprises an additional exogenous material, a solvate of the present invention comprising a multivalent CD20-binding molecule of the present invention which comprises an additional exogenous material, a salt of the present invention comprising a multivalent CD20-binding molecule of the present invention which comprises an additional exogenous material, a pharmaceutical composition of the present invention comprising a multivalent CD20-binding molecule of the present invention which comprises an additional exogenous material, and/or a diagnostic composition of the present invention comprising a multivalent CD20-binding molecule of the present invention which comprises an additional exogenous material. For certain further embodiments, the cell is physically coupled with CD20 which have the extracellular part bound by two or more CD20 binding regions of the multivalent CD20-binding molecule. For certain further embodiments, the cell expresses at a cellular surface the CD20 which (1) have the extracellular part bound by the two or more CD20 binding regions of the multivalent CD20-binding molecule, (2) have a transmembrane domain, and (3) remain physically coupled to the cell. For certain further embodiments, the cell is a CD20 positive cell. For certain embodiments, the cell is physically coupled with a significant amount of extracellular CD20 which (1) have the extracellular part bound by the two or more CD20 binding regions of the multivalent CD20-binding molecule. For certain embodiments, the cell is a descendant or member of a B-cell lineage. For certain embodiments, the cell is selected from the group consisting of: malignant B-cell, B-cell leukemia cell, B-cell lymphoma cell, B-cell myeloma cell, acute myeloid leukemia cell, acute non-lymphocytic leukemia cell, B-cell chronic lymphocytic leukemia cell, B-cell lymphoma cell, B-cell non-Hodgkin's lymphoma cell, B-cell precursor acute lymphoblastic leukemia cell, B-cell prolymphocytic leukemia cell, Burkitt's lymphoma cell, chronic lymphocytic leukemia cell, chronic myeloid leukemia cell, diffuse large B-cell lymphoma cell, follicular lymphoma cell, hairy cell leukemia cell, Hodgkin's lymphoma cell, immunoblastic large cell lymphoma cell, mantle cell lymphoma cell, melanoma cell, multiple myeloma cell, neoplastic plasma cell, nodular lymphocyte predominant Hodgkin's lymphoma cell, non-Hodgkin's lymphoma cell, plasmablastic lymphoma cell, plasma cell myeloma cell, precursor B-lymphoblastic lymphoma cell, small lymphocytic lymphoma cell, malignant T-cell, T-cell leukemia cell, T-cell lymphoma cell, T-cell large granular lymphocyte leukemia cell, T-cell prolymphocytic leukemia, healthy B-cell lineage cell, and/or healthy T-cell.

[0452] For certain embodiments, the present invention provides a method of delivering an exogenous material (e.g., a detection promoting agent for collecting diagnostic information) to the inside of a cell in a patient, the method comprising the step of administering to the patient a multivalent CD20-binding molecule of the present invention which comprises an additional exogenous material, a multivalent CD20-binding molecule composition of the present invention comprising a multivalent CD20-binding molecule of the present invention which comprises an additional exogenous material, a solvate of the present invention comprising a multivalent CD20-binding molecule of the present invention which comprises an additional exogenous material, a salt of the present invention comprising a multivalent CD20-binding molecule of the present invention which comprises an additional exogenous material, a pharmaceutical composition of the present invention comprising a multivalent CD20-binding molecule of the present invention which comprises an additional exogenous material, and/or a diagnostic composition of the present invention comprising a multivalent CD20-binding molecule of the present invention which comprises an additional exogenous material.

[0453] Among certain embodiments of the present invention is a method of using a multivalent CD20-binding molecule of the present invention and/or a composition thereof (e.g. a diagnostic composition of the present invention) to detect the presence of a cell (e.g., a CD20-expressing cell, a CD20 positive cell, a CD20+ cell type, and/or a cell physically coupled with a significant amount of cell-surface CD20) for the purpose of information gathering regarding diseases, conditions and/or disorders characterized by CD20 cell-surface expression, characterized by changes in the amount of cell surface accessible CD20, and/or associated with changes in CD20 cell-surface expression. The method comprises contacting a cell with a diagnostically sufficient amount of a multivalent CD20-binding molecule of the present invention and/or a composition thereof to detect the multivalent CD20-binding molecule by an assay or diagnostic technique.

[0454] The term “diagnostically sufficient amount” refers to an amount that provides adequate detection and accurate measurement for information gathering purposes by the particular assay or diagnostic technique utilized. Generally, the diagnostically sufficient amount for a whole organism in vivo diagnostic use will be a non-cumulative dose between 0.1 mg to 100 mg of the detection promoting agent linked-multivalent CD20-binding molecule per kg of subject per subject. Typically, the amount of multivalent CD20-binding molecule used in these information gathering methods will be as low as possible provided that it is still a diagnostically sufficient amount. For example, for in vivo detection in an organism, the amount of multivalent CD20-binding molecule administered to a subject will be as low as possible.

[0455] The cell type-specific targeting of multivalent CD20-binding molecule of the present invention combined with detection promoting agents provides a way to detect and image cells physically coupled with an extracellular CD20 target biomolecule. Imaging of CD20+ cells using the multivalent CD20-binding molecule of the present invention and/or a composition thereof may be performed in vitro or in vivo by any suitable technique known in the art. Diagnostic information may be collected using various methods known in the art, including whole body imaging of an organism or using ex vivo samples taken from an organism. The term “sample” used herein refers to any number of things, but not limited to, fluids such as blood, urine, serum, lymph, saliva, anal secretions, vaginal secretions, and semen, and tissues obtained by biopsy procedures. For example, various detection promoting agents may be utilized for non-invasive in vivo tumor imaging by techniques such as magnetic resonance imaging (MRI), optical methods (such as direct, fluorescent, and bioluminescent imaging), positron emission tomography (PET), single-photon emission computed tomography (SPECT), ultrasound, x-ray computed tomography, and combinations of the aforementioned.

[0456] Among certain embodiments of the present invention is a method of using a multivalent CD20-binding molecule of the present invention and/or a composition thereof (e.g. a pharmaceutical and/or diagnostic composition of the present invention) to label or detect the interiors of CD20+ neoplastic cells and/or immune cell types. Based on the ability of the multivalent CD20-binding molecule of the present invention to enter specific cell types and route within cells via retrograde intracellular transport, the interior compartments of specific cell types are labeled for detection. This can be performed in vivo on cells in situ, at disease loci within a patient, or in vitro in an ex vivo setting on cells and tissues removed from an organism, e.g. biopsy material. The detection of CD20+ cells, cell types, and cell populations may be used in the diagnosis and imaging of tumors and immune cells that express elevated levels of CD20. Certain multivalent CD20-binding molecules of the present invention and/or compositions thereof may be employed to image or visualize a site of possible accumulation of CD20+ cells in a mammal. These methods may be used to identify sites of tumor development or residual tumor cells after a therapeutic intervention.

[0457] Diagnostic compositions of the present invention may be used to characterize a disease, disorder, or condition as potentially treatable by a related pharmaceutical composition of the invention. Certain compositions of matter of the invention may be used to determine whether a patient belongs to a group that responds to a therapeutic strategy which makes use of a multivalent CD20-binding molecule of the present invention, and/or a composition thereof, or related method of the invention as described herein or is well suited for using a delivery device of the invention.

[0458] Diagnostic compositions of the present invention may be used after a disease, e.g. cancer, is detected in order to better characterize it, such as to monitor distant metastases, heterogeneity, and stage of cancer progression. The phenotypic assessment of disease disorder or infection can help prognosis and prediction during therapeutic decision making. In disease reoccurrence, certain methods of the invention may be used to discriminate local versus systemic problems.

[0459] Diagnostic compositions of the present invention may be used to assess responses to therapeutic(s) regardless of the type of therapeutic, e.g. small molecule drug or biological drug, or cell-based therapy. For example, certain embodiments of the diagnostic compositions of the present invention may be used to measure changes in tumor size, changes in CD20+ cell populations including number and distribution, or monitoring a different marker than the antigen targeted by a therapy already being administered to a patient.

[0460] Certain embodiments of the method detecting the presence of a CD20+ cell type may be used to gather information regarding diseases, disorders, and conditions, such as, for example cells related to malignant cells, tumor cells, cancer cells, and/or immune cells related to hematologic diseases, rheumatic diseases, hematologic cancers, leukemias, lymphomas, melanomas, myelomas, B-cell lymphomas, B-cell non-Hodgkins lymphomas (B-cell NHL), Burkitt's lymphomas (BL), B-cell chronic lymphocytic leukemias (B-cell CLL), chronic lymphocytic leukemias (CLL), diffuse large B-cell lymphomas (DLBCL or DLBL), follicular lymphomas (FL), hairy cell leukemias (HCL), Hodgkins lymphomas (HD), immunoblastic large cell lymphomas, mantle cell lymphomas (MCL), melanomas, non-Hodgkins lymphomas (NHL), precursor B-lymphoblastic lymphomas (B-LBL), small lymphocytic lymphoma (SLL), and T-cell lymphomas (TCL), amyloidosis, ankylosing spondylitis, asthma, Crohn's disease, diabetes, graft rejection, graft-versus-host disease, Hashimoto's thyroiditis, hemolytic uremic syndrome, HIV-related diseases, lupus erythematosus, multiple sclerosis, polyarteritis nodosa, polyarthritis, psoriasis, psoriatic arthritis, rheumatoid arthritis, scleroderma, septic shock, Sjörgren's syndrome, ulcerative colitis, and/or vasculitis.

[0461] In certain embodiments, the multivalent CD20-binding molecule of the present invention and/or a composition thereof are used for both diagnosis and treatment, or for diagnosis alone.

[0462] The present invention is further illustrated by the following non-limiting examples of compositions comprising selectively cytotoxic multivalent CD20-binding molecules with Shiga toxin effector regions derived from A Subunits of members of the Shiga toxin family and two or more CD20 binding regions capable of binding extracellular parts of CD20 physically coupled to specific, CD20-expressing cell types.

### EXAMPLES

[0463] The following Examples describe different multivalent CD20-binding molecules comprising Shiga toxin A Subunit effector polypeptide regions. Exemplary, multivalent, CD20-binding molecules of the present invention 1) bound to CD20 expressed at the surface of target cell types, such as, e.g., human lymphoma cells, 2) enter target cells, and effectively routed, catalytically active, Shiga toxin effector polypeptide to the cytosol of target cells resulting in the death of these CD20-expressing cells.

[0464] The exemplary, multivalent CD20-binding molecule compositions of the present invention, which were enriched with high-proportions of multivalent CD20-binding molecule(s) relative to monovalent CD20-binding molecule(s), showed greatly improved cytotoxic activity compared to a protein composition predominantly composed of a monovalent CD20-binding protein, which was a component of the exemplary, multivalent CD20-binding molecules of the present invention shown in Example 1. The improved cytotoxic effects of exemplary, multivalent CD20-binding molecule compositions of the present invention could not be accounted for by predicted increases in cytotoxicity resulting from increases in the CD20-binding valences of the multivalent CD20-binding molecule variants as compared to the monovalent CD20-binding molecule.

[0465] Throughout the Examples, the term “CD20-binding protein” is used to refer to a Shiga toxin A Subunit derived, immunotoxin comprising one or more recombinant fusion polypeptides, which each comprise 1) one or more immunoglobulin-type CD20 binding regions capable of binding an extracellular part of a CD20 with high affinity, and 2) one or more Shiga toxin effector polypeptide regions. Certain multivalent CD20-binding proteins of the present invention shown in the Examples below were multimeric, such as, e.g., a homodimer consisting essentially of two, identical, monovalent CD20-binding proteins which were linked together.

### Example 1. Exemplary, Multivalent CD20-Binding Proteins of the Present Invention and Enriched Compositions Thereof

[0466] Exemplary, multivalent CD20-binding molecules of the present invention were created by linking multiple, CD20-binding, single-chain, variable fragment (scFv) polypeptides with multiple, Shiga toxin A Subunit effector polypeptides using reagents and techniques known to the skilled worker. In this Example, the exemplary, multivalent CD20-binding molecules of the present invention were multivalent CD20-binding proteins which each comprised 1) two or more single-chain, variable fragment (scFv), binding regions capable of binding an extracellular CD20 with high affinity linked with 2) two or more Shiga toxin A Subunit derived toxin effector regions.

[0467] Multivalent CD20-binding proteins were designed, produced, and purified using techniques known to the skilled worker to create protein compositions where the predominant protein(s) in the composition were multivalent CD20-binding proteins of the present invention. For example, the exemplary compositions (αCD20-scFv::SLT-1A)₂ and (αCD20-scFv::SLT-1A)₂₊ₙ a were predominantly composed of proteins that were multivalent CD20-binding proteins of the present invention. As shown below, exemplary, multivalent, CD20-binding protein compositions of the present invention were capable, via the activity of their multivalent CD20-binding protein constituent(s), of selectively killing cells that express CD20 on their surface by internalizing, routing a toxin effector region to the cytosol, and inactivating ribosomes.

[0468] However, the protein composition αCD20-scFv::SLT-1A, which was predominantly composed of monovalent CD20-binding protein representing a component of the multivalent CD20-binding proteins of this Example, did not exhibit potent, CD20-targeted cytotoxicity over a wide-range of protein concentrations. The monovalent CD20-binding protein composition αCD20-scFv::SLT-1A was unexpectedly found to be inactive at concentrations with similar total molecule binding levels to CD20-expressing cells as concentrations of exemplary, multivalent CD20-binding protein compositions of the present invention at which these exemplary multivalent CD20-binding protein compositions exhibited potent targeted-cytotoxicity to CD20-expressing cells. This was surprising because the monovalent CD20-binding protein 1) had the same CD20 binding region and Shiga toxin effector region as the exemplary, multivalent CD20-binding proteins and 2) exhibited a similar catalytic activity in vitro as the exemplary, multivalent CD20-binding proteins.

### A. Construction, Production, and Purification of Cytotoxic, Multivalent, CD20-Binding Proteins to Produce the Composition (αCD20-scFv::SLT-1A)ₙ

[0469] In this Example, the Shiga toxin effector region was derived from the A Subunit of Shiga-like toxin 1 (SLT-1A). A polynucleotide was obtained that encoded amino acids 1-251 of SLT-1A (Cheung M et al., Mol Cancer 9: 28 (2010)). Immunoglobulin-type binding regions comprising single-chain variable fragments (scFv) αCD20-scFv were derived from a monoclonal antibody, developed to bind human CD20, such that a single-chain variable fragment was created with the two immunoglobulin variable regions (V_{L} and V_{H}) separated by a linker known in the art. The immunoglobulin-type binding region and the Shiga toxin effector region were cloned in frame to form a genetically fused protein.

[0470] A polynucleotide encoding the Shiga toxin effector region comprising the polypeptide shown in SEQ ID NO:4 (corresponding to amino acids 1-251 of SEQ ID NO:1) was cloned in frame with a polynucleotide encoding an immunoglobulin-type binding region αCD20-scFv. In certain experiments, the full-length coding sequence of the subunit of the multivalent cytotoxic proteins of this Example included a polynucleotide encoding a myc tag or Strep-tag® II to facilitate detection and/or purification. A polynucleotide encoding an αCD20-scFv::SLT-1A fusion protein subunit (SEQ ID NO:54) of the multivalent CD20-binding protein(s) of the exemplary protein composition “(αCD20-scFv::SLT-1A)ₙ” were synthesized using services from DNA 2.0, Inc. (Menlo Park, Calif., U.S.) or cloned using standard techniques.

[0471] CD20-binding proteins comprising the constituents of the protein composition (αCD20-scFv::SLT-1A)ₙ were produced by protein expression from the polynucleotide template encoding the protein αCD20-scFv::SLT-1A (SEQ ID NO:54) using a bacterial system or cell-free expression system known in the art. Protein purification was accomplished using standard techniques known in the art, including capto-L and chitin affinity chromatography. For certain purifications, multivalent CD20-binding proteins were produced in bacteria and purified with the IMPACT™ (Intein Mediated Purification with an Affinity Chitin-binding Tag) system (New England Biolabs, Ipswich, Mass., U.S.). Chitin affinity purification was performed according to the manufacturer's instructions except in certain purifications, a protein L column chromatography step was performed and then the intein was cleaved. Then uncleaved material was removed using chromatography through a chitin resin in flow-through mode.

[0472] After purification, the (αCD20-scFv::SLT-1A)ₙ protein composition was oxidized using copper sulfate as a catalyst. Then, the oxidized (αCD20-scFv::SLT-1A)ₙ composition was purified into three different CD20-binding protein compositions using hydroxyapatite (hydroxylapatite) chromatography. Hydroxyapatite chromatography was used to separate different monomeric and multimeric forms of the CD20-binding proteins of the (αCD20-scFv::SLT-1A)ₙ composition into different chromatographic fractions and then certain fractions were pooled—one protein pool named “αCD20-scFv::SLT-1A composition” predominantly comprised the monovalent CD20-binding protein αCD20-scFv::SLT-1A (n=1); another protein pool named “(αCD20-scFv::SLT-1A)₂ composition” predominantly comprised monospecific, bivalent CD20-binding protein (n=2) and represents an exemplary, multivalent CD20-binding molecule composition of the present invention; and a third protein pool predominantly comprised monospecific, multivalent CD20-binding proteins of various sizes (n=2, 3, 4, 5, 6, etc.) with only a minority of the size of a bivalent CD20-binding protein. The third protein pool was further purified to reduce the amounts of monovalent CD20-binding protein αCD20-scFv::SLT-1A and bivalent CD20-binding protein using a second hydroxyapatite chromatography purification step followed by a size exclusion chromatography step and chromatographic fraction collection. Certain fractions comprising molecular sizes estimated to be large than bivalent CD20-binding protein were pooled to create the exemplary, multivalent CD20-binding molecule composition of the present invention named “(αCD20-scFv::SLT-1A)ₙ₊₂ composition” (i.e. n+2≧3). The three protein pools (CD20-binding protein compositions) were individually concentrated.

[0473] The protein makeup of each of the three CD20-binding protein compositions (1) αCD20-scFv::SLT-1A, (2) (αCD20-scFv::SLT-1A)₂, and (3) (αCD20-scFv::SLT-1A)ₙ₊₂ was analyzed by size exclusion chromatography (SEC) using a Superdex 200 30/300 column (GE Healthcare, Little Chalfont, Buckinghamshire, U.K.) with a 24 mL bed volume (FIG. 2; Table 1). For the SEC chromatographic analysis, each sample was loaded and then at least 24 mL of buffer was flowed through the column while an ultraviolet (uv) light detector monitored the absorbance at 280 nanometers (nm) of the eluted materials as reported in milli-absorbance units (mAU) (FIG. 2; Table 1). Generally, smaller-sized molecules are retarded when flowing through matrices used for size exclusion chromatography as compared to larger-sized molecules and, therefore, smaller-sized molecules exhibit longer, SEC retention times than larger-sized molecules. Thus, the measuring of SEC retention times can provide an estimate of the relative proportion(s) of differently-sized molecular constituents within in a composition, and, thus, the purity of a composition with regard to molecular constituents of certain sizes.

TABLE 1
Size Exclusion Chromatographic Analysis of Purified Compositions
Having Different Forms of αCD20-scFv::SLT-1A: Relative proportions of
different monomeric and multimeric αCD20-scFv::SLT-1A structures

| | | | Multimers > |
|---|---|---|---|
| | Monomer | Dimer | Dimer |
| αCD20-scFv::SLT-1A pool | 95.0% | 5.0% | 0.0% |
| (αCD20-scFv::SLT-1A)₂ pool | 0.0% | 79.0% | 21.0% |
| (αCD20-scFv::SLT-1A)ₙ₊₂ pool | 3.0% | 9.0% | 88.0% |
| average retention (mL) | 15.5 | 13.8 | 12.1 |

*“Multimers > Dimer” refers to a class of multivalent CD20-binding protein multimers of sizes larger than a dimer

[0474] Table 1 shows the relative proportions of three different classes of CD20-binding protein present in the protein compositions as differentiated by size: 1) αCD20-scFv::SLT-1A class, (2) (αCD20-scFv::SLT-1A)₂ class, and (3) (αCD20-scFv::SLT-1A)ₙ₊₂ class. The αCD20-scFv::SLT-1A composition comprised 95 percent monomeric CD20-binding protein of the total protein present, and each of these monomeric CD20-binding proteins was monovalent for CD20 binding. The (αCD20-scFv::SLT-1A)₂ composition did not comprise any measurable amount of monomeric CD20-binding protein instead comprising 100 percent multivalent CD20-binding protein of the total protein present. For the (αCD20-scFv::SLT-1A)₂ composition, 79 percent of the protein present was dimeric and 21 percent of the protein present was the size of a multimeric form(s) greater than the size of any dimeric form. Finally, the analysis showed that the (αCD20-scFv::SLT-1A)₂₊ₙ composition comprised mostly multivalent CD20-binding protein of molecular sizes greater than the size of a dimeric form (88 percent of the total protein was of a size greater than the size of a dimer), but this composition also comprised a minor proportion of dimeric form(s) of multivalent CD20-binding protein and an even smaller proportion of the monomeric CD20-binding protein. The dimeric form(s) of the CD20-binding protein present in these three compositions represent exemplary, multivalent CD20-binding protein(s) of the present invention that are both bivalent and multimeric.

[0475] The three CD20-binding protein compositions (1) αCD20-scFv::SLT-1A, (2) (αCD20-scFv::SLT-1A)₂, and (3) (αCD20-scFv::SLT-1A)ₙ₊₂ were also analyzed by SDS polyacrylamide gel electrophoresis (SDS-PAGE). A sample from each of the three purified protein compositions was subjected to reducing conditions of 42 millimolar (mM) dithiolthreitol (DTT) and denatured at 95° C. for 5 minutes to investigate the presence of reducible covalent bonds, such as, e.g. cysteine disulfide bonds, linking proteinaceous components of the multivalent CD20-binding proteins present in the compositions. Samples were diluted with 3×SDS Blue Loading Buffer (187.5 mM Tris-HCl (pH 6.8), 6% mass/volume percentage (w/v) sodium dodecyl sulfate (SDS), 30% glycerol and 0.03% (w/v) bromophenol blue, Catalog # B7703S, New England BioLabs, Inc., Ipswich, Mass., U.S.) or 3×SDS Reducing Blue Loading Buffer (187.5 mM Tris-HCl (pH 6.8), 6% (w/v) SDS, 30% glycerol, 0.03% (w/v) bromophenol blue, and 125 mM DTT, Catalog # B7703S, New England BioLabs, Inc., Ipswich, Mass., U.S.) to a final composition of 1× buffer and mixed well. The samples were heated at 95° C. for 5 minutes and then 5 micrograms (μg) of protein sample per well was loaded into wells of a 4-20% SDS polyacrylamide gel and subjected to electrophoresis.

[0476] Samples of both reduced and non-reduced purified protein pools were analyzed in denaturing conditions by SDS-PAGE (FIG. 3). FIG. 3 shows images of a Coomassie-stained, 4-20% SDS-PAGE gel (Lonza, Basel, CH) with the lanes of the gel numbered and the figure legend indicating which sample was loaded into each lane by the same respective numbering. Multimeric forms of the multivalent CD20-binding proteins present in a sample whose subunits are associated only from non-covalent interactions were expected to dissociate into their component monovalent proteins in this denaturing gel analysis regardless of redox state due to the nature of the SDS-PAGE technique performed. In contrast, multimeric forms of the multivalent CD20-binding proteins present in a sample that result from reducible covalent bonds, such as, e.g., cysteine disulfide bridge-dependent forms, might be observed to dissociate into proteinaceous components in reduced samples but not in unreduced samples. However, in both situations incomplete, disulfide bond reduction and/or protein denaturation could permit the persistence of multimeric structures.

[0477] The electrophoresis analysis showed that the majority proteinaceous species in the αCD20-scFv::SLT-1A composition migrated at a molecular mass of about 55 kDa (FIG. 3), which was the approximate size expected for SEQ ID NO:54, which has an anti-CD20 scFv fused to the Shiga toxin A Subunit effector polypeptide SLT-1A 1-251. The size of this species was unchanged between non-reducing and reducing conditions (FIG. 3). These results were consistent with the majority protein species in the αCD20-scFv::SLT-1A composition as being the monomeric, monovalent CD20-binding protein component of the exemplary, multivalent CD20-binding protein compositions of this Example.

[0478] The electrophoresis analysis showed that the majority proteinaceous species in the (αCD20-scFv::SLT-1A)₂ composition migrated at a molecular mass of about 110 kDa (FIG. 3, lane 5), which was the approximate size expected for a dimeric form consisting of exactly two of the monomeric, monovalent CD20-binding proteins of the αCD20-scFv::SLT-1A composition. There was also a minority proteinaceous species present in the (αCD20-scFv::SLT-1A)₂ composition which migrated at a molecular mass of about 55 kDa under non-reducing conditions and might represent the monomeric, monovalent CD20-binding protein component αCD20-scFv::SLT-1A after the denaturation of a dimeric form(s) that result from one or more non-covalent association(s) but not any covalent linkage(s), such as, e.g., a cysteine disulfide bond. The size of the vast majority of this majority species changed to about 55 kDa under reducing conditions (FIG. 3, lane 5), which was consistent with the existence, under non-reducing conditions, of one or more disulfide bonds linking two, monomeric, monovalent CD20-binding protein molecules together in a dimeric form(s) for the majority protein species present in the (αCD20-scFv::SLT-1A)₂ composition.

[0479] The electrophoresis analysis showed that the majority proteinaceous species in the (αCD20-scFv::SLT-1A)₂₊ₙ composition migrated at a molecular mass of about 55 kDa or 110 kDa (FIG. 3, lane 7), which was the approximate size expected for either the monomeric, monovalent CD20-binding protein component αCD20-scFv::SLT-1A or a dimeric form(s) consisting of exactly two monovalent CD20-binding protein components. The size of the vast majority of the dimeric protein species changed to about 55 kDa under reducing conditions (FIG. 3, lane 6), which was consistent with the existence, under non-reducing conditions, of one or more disulfide bonds linking two, monovalent CD20-binding protein molecules together in a dimeric form(s) in the (αCD20-scFv::SLT-1A)₂₊ₙ composition.

[0480] The comparison of the reduced and non-reduced samples electrophoretically separated through SDS-PAGE gels under denaturing showed that the compositions (αCD20-scFv::SLT-1A)₂ and (αCD20-scFv::SLT-1A)ₙ₊₂ included both covalent and non-covalent multimers (FIG. 3, lanes 4-7). These exemplary compositions of multivalent CD20-binding proteins of the present invention, (αCD20-scFv::SLT-1A)₂ and (αCD20-scFv::SLT-1A)ₙ₊₂ comprise multivalent CD20-binding proteins which have covalently linked, protein subunits and/or non-covalent linked protein subunits.

### B. Determining the Cell-Binding Characteristics of Multivalent CD20-Binding Proteins Present in Exemplary Compositions of the Present Invention

[0481] The binding characteristics of the multivalent CD20-binding protein compositions (αCD20-scFv::SLT-1A)₂ and (αCD20-scFv::SLT-1A)ₙ₊₂ to human tumor-derived, cell lines were studied using a fluorescence-based, flow-cytometry assay. The protein compositions (αCD20-scFv::SLT-1A)₂ and (αCD20-scFv::SLT-1A)ₙ₊₂, which were produced as described above, were analyzed for the ability of their multimeric, multivalent CD20-binding proteins having Shiga toxin effector regions to bind to human tumor-derived, cell lines that express human CD20 at a cellular surface.

[0482] Samples containing CD20 positive (CD20+) Raji cells or CD20 negative (CD20−) U266 cells were suspended in 1×PBS containing one percent bovine serum albumin (BSA) (Calbiochem, San Diego, Calif., U.S.), hereinafter referred to as “1×PBS+1% BSA” and incubated for one hour at 4 degrees Celsius (° C.) with 100 microliters (μL) of various dilutions of the multivalent CD20-binding protein compositions to be assayed. After the one-hour incubation, samples comprising a mixture of cells and a multivalent CD20-binding protein composition were washed twice with 1×PBS+1% BSA. Then the samples were incubated for one hour at 4° C. with 100 μL of 1×PBS+1% BSA solution comprising a murine monoclonal antibody anti-SLT-1A (BEI NR-867 BEI Resources, Manassas, Va., U.S.; cross reactive with Shiga toxin and Shiga-like toxin 1 A subunits) at an antibody concentration larger than the total protein concentration present in each sample. The samples were washed with 1×PBS+1% BSA and then incubated in the same manner with an anti-mouse IgG secondary antibody conjugated with FITC at an antibody concentration larger than the total protein concentration present in each sample. Then the samples were washed twice with 1×PBS+1% BSA, resuspended in 200 μL of 1×PBS, and subjected to fluorescence-based, flow cytometry in order to measure protein binding to the cells.

[0483] The maximum specific binding (Bₘₐₓ) and equilibrium binding constants (K_{D}) of αCD20-scFv::SLT-1A, (αCD20-scFv::SLT-1A)₂ and (αCD20-scFv::SLT-1A)ₙ₊₂ samples to human tumor-derived, cell lines were determined as follows. The mean fluorescence intensity (MFI) data from the fluorescence-based, flow cytometry for all the samples was obtained by gating the data using a cell sample incubated only with the secondary antibody as a negative control. Graphs were plotted of the MFI data versus “concentration of protein” using Prism software (GraphPad Software, San Diego, Calif., U.S.) (FIG. 4). Using the Prism software function of one-site binding [Y=Bₘₐₓ*X/(K_{D}+X)] under the heading binding-saturation, the Bₘₐₓ and K_{D} were calculated using baseline corrected data. Light absorbance (Abs) values were corrected for background by subtracting the Abs values measured for wells containing only PBS. Bₘₐₓ is the maximum specific binding reported in MFI. K_{D} is the equilibrium binding constant, reported in nanograms per milliliter (ng/mL). The K_{D} and Bₘₐₓ values for the compositions (αCD20-scFv::SLT-1A)₂ and (αCD20-scFv::SLT-1A)ₙ₊₂ are reported in Table 2 and shown in FIG. 4.

TABLE 2
Binding of Exemplary, Multivalent αCD20-scFv::SLT-1A
Compositions of the Invention to CD20+ Raji Cells as Compared
to a Monovalent CD20-Binding Protein Composition

| Protein Composition | Bₘₐₓ (MFI) | K_{D} (ng/mL) |
|---|---|---|
| (αCD20-scFv::SLT-1A)₂ dimer | 167,728 | 180.2 |
| (αCD20-scFv::SLT-1A)ₙ₊₂ | 147,366 | 176.9 |
| αCD20-scFv::SLT-1A monomer | 178,118 | 544.1 |

[0484] The Bₘₐₓ for (CD20-scFv::SLT-1A)₂ binding to CD20⁺ Raji cells was measured to be about 170,000 MFI with a K_{D} of about 180 ng/mL (Table 2; FIG. 4). The Bₘₐₓ for (CD20-scFv::SLT-1A)ₙ₊₂ binding to CD20⁺ Raji cells was measured to be about 150,000 MFI with a K_{D} of about 180 ng/mL (Table 2; FIG. 4). Thus, exemplary protein compositions of the present invention (αCD20-scFv::SLT-1A)₂ and (αCD20-scFv::SLT-1A)ₙ₊₂ (which were predominantly composed of multimeric, multivalent CD20-binding proteins) both exhibited high-affinity binding to human CD20-expressing human cells expressing CD20 at a cell surface (e.g. CD20⁺ human cells). It is unknown whether any multimeric form of CD20-scFv::SLT-1A present in either the (αCD20-scFv::SLT-1A)₂ or (αCD20-scFv::SLT-1A)ₙ₊₂ compositions is capable of simultaneously binding two, different, CD20 target biomolecules present at the cell surface of a single, CD20-expressing cell.

C. Determining the Half-Maximal Inhibitory Concentration (IC₅₀) of the Proteins (αCD20-scFv::SLT-1A)₂ and (αCD20-scFv::SLT-1A)ₙ₊₂ to Eukaryotic Ribosomes In Vitro

[0485] The ribosome inactivation capabilities of the (αCD20-scFv::SLT-1A)₂ and (αCD20-scFv::SLT-1A)ₙ₊₂ protein compositions were determined in a cell-free, in vitro protein translation assay using the TNT® Quick Coupled Transcription/Translation Kit (L1170 Promega, Madison, Wis., U.S.). The kit includes Luciferase T7 Control DNA and TNT® Quick Master Mix. The ribosome activity reaction was prepared according to the manufacturer's instructions to create “TNT” reaction mixtures. The concentrations of CD20-binding protein present in the samples were calculated based on the molarity of the SLT-1A components (see below). A series of 10-fold dilutions of the CD20-binding protein compositions to be analyzed was prepared in an appropriate buffer, and a series of identical TNT reaction mixture components was created for each sample dilution.

[0486] Each sample in the dilution series was combined with each of the TNT reaction mixtures along with the Luciferase T7 Control DNA. The test samples were incubated for 1.5 hours at 30° C. After the incubation, Luciferase Assay Reagent (E1483 Promega, Madison, Wis., U.S.) was added to all test samples, and the amount of luciferase protein translation was measured by luminescence according to the manufacturer's instructions. The level of translational inhibition was determined by non-linear regression analysis of log-transformed molar concentrations of the total protein, estimated based on the normalized molar concentration of Shiga toxin protein versus relative luminescence units. Using statistical software (GraphPad Prism, San Diego, Calif., U.S.), the half maximal inhibitory concentration (IC₅₀) in picomolar (pM) value was calculated for each CD20-binding protein composition tested (FIG. 5; Table 3).

TABLE 3
Ribosome Inactivation Analysis: Representative half-maximal
inhibitory concentrations (IC₅₀) of multivalent CD20-binding proteins
of the invention as compared to a monovalent CD20-binding protein

| Protein | IC₅₀ (pM) |
|---|---|
| (αCD20-scFv::SLT-1A)₂ | 5.29 |
| (αCD20-scFv::SLT-1A)ₙ₊₂ | 10.74 |
| αCD20-scFv::SLT-1A monomer | 3.14 |
| SLT-1 A (1-251) only positive control | 3.15 |

[0487] The inhibitory effects of the exemplary, multivalent CD20-binding protein compositions (CD20-scFv::SLT-1A)₂ and (CD20-scFv::SLT-1A)ₙ₊₂ on cell-free protein synthesis were strong (FIG. 5; Table 3). Dose-dependence experiments determined that the IC₅₀ values of the multivalent CD20-binding molecules present in (CD20-scFv::SLT-1A)₂ and (CD20-scFv::SLT-1A)ₙ₊₂ to protein synthesis in this cell-free assay were about 5.3 pM and 11 pM, respectively (FIG. 5; Table 3).

D. Determining the Half-Maximal Cytotoxic Concentrations (CD₅₀) of the Multivalent CD20-Binding Proteins (αCD20-scFv::SLT-1A)₂ and (αCD20-scFv::SLT-1A)ₙ₊₂ Using a CD20+ Cell-Kill Assay

[0488] Dose dependence experiments were used to determine the CD₅₀ values of the exemplary, multivalent CD20-binding protein compositions of the present invention (αCD20-scFv::SLT-1A)₂ and (αCD20-scFv::SLT-1A)ₙ₊₂. The cytotoxicity characteristics of the (αCD20-scFv::SLT-1A)₂ and (αCD20-scFv::SLT-1A)ₙ₊₂ compositions were determined by the following CD20+ cell-kill assay. This assay determines the capacity of a protein sample to kill cells expressing at a cellular surface the CD20 target biomolecule of the multivalent CD20-binding protein's binding region(s). CD20+ Raji cells and CD20+ST486 cells were plated (7.5×10³ cells per well) in 20 μL cell culture medium in 384-well plates. The multivalent CD20-binding protein compositions to be tested were diluted 10-fold in a 1×PBS, and 5 μL of the dilutions were added to the CD20+ and CD20− cell samples in the 384-well plates. Control wells containing only cell culture medium were used for baseline correction. The cell samples were incubated with protein samples or just buffer for three days at 37° C. and in an atmosphere of 5% carbon dioxide (CO₂). The total cell survival or percent viability was determined using a luminescent readout using the CellTiter-Glo® Luminescent Cell Viability Assay (G7573 Promega Madison, Wis., U.S.) according to the manufacturer's instructions. The Percent Viability of experimental wells was calculated using the following equation: (Test RLU−Average Media RLU)/(Average Cells RLU−Average Media RLU)*100. Log polypeptide concentration versus Percent Viability was plotted in Prism (GraphPad Prism, San Diego, Calif., U.S.) and log (inhibitor) vs. response (3 parameter) analysis were used to determine the half-maximal cytotoxic concentration (CD₅₀) value for the multivalent CD20-binding protein compositions (αCD20-scFv::SLT-1A)₂ and (αCD20-scFv::SLT-1A)ₙ₊₂ to CD20+ cells.

[0489] The CD₅₀ value of (αCD20-scFv::SLT-1A)₂ composition to CD20⁺ Raji cells was 250 ng/mL (Table 4; FIG. 6). The CD₅₀ value of the composition (αCD20-scFv::SLT-1A)ₙ₊₂ to CD20⁺ Raji cells was about 220 ng/mL (Table 4; FIG. 6). In contrast, the CD₅₀ value of the monomeric, monovalent CD20-binding protein composition αCD20-scFv::SLT-1A was much higher (i.e. less potent) such that at the tested concentrations a CD₅₀ could not be accurately determined from the shape of the curve (Table 4, “NC” denotes not calculable; FIG. 6). For the protein concentrations and cell densities tested in this assay, it was estimated that at certain concentrations of the proteins tested, the available cell-surface CD20 present could be saturated by CD20-binding protein (see, Muller P, Brennan F, Clin Pharmacol Ther 85: 247-58 (2009), for an exemplary “RO model” used to estimate occupancy).

TABLE 4
Cytotoxicity: Representative half-maximal cytotoxic concentrations
(CD₅₀) for exemplary, multivalent CD20-binding protein compositions
of the present invention to CD20+ Raji Cells

| Protein | CD₅₀ (ng/mL) |
|---|---|
| (αCD20-scFv::SLT-1A)₂ | 249.0 |
| (αCD20-scFv::SLT-1A)ₙ₊₂ | 217.7 |
| αCD20-scFv::SLT-1A | NC* |

*“NC” (not calculable) indicates that an accurate CD₅₀ could not be calculated based on the shape of the curve.

[0490] Using the same cell-kill assay, the (αCD20-scFv::SLT-1A)₂ protein composition was shown in other experiments to be nontoxic to CD20 negative cell lines, such as, e.g., BC-1, U266, and H929 cells, when tested at similar cell densities and CD20-binding protein concentrations, which included protein concentrations as high as 40,000 ng/mL. Also using the same cell-kill assay, both the SLT-1A (1-251) component alone and the monomeric, monovalent CD20-binding protein composition αCD20-scFv::SLT-1A did not exhibit specific cytotoxicity toward CD20+ Raji cells at protein concentrations as large as 24,000 ng/mL.

[0491] The cytotoxicity measurements of the monovalent CD20-binding protein composition αCD20-scFv::SLT-1A showed that αCD20-scFv::SLT-1A exhibited no greater cytotoxicity towards CD20⁺ Raji cells at the tested cell density and protein concentrations compared with the cytotoxicity of an SLT-1A (1-251) “only” negative control sample, which lacked any cell-targeting moiety like a cell-surface receptor binding region. Thus, the monovalent CD20-binding protein composition αCD20-scFv::SLT-1A exhibited only non-specific cytotoxicity regardless of cell-surface marker expression. In conclusion, the monovalent CD20-binding protein αCD20-scFv::SLT-1A was incapable of killing CD20+ cells at the protein concentrations tested; whereas, the exemplary, multivalent CD20-binding protein compositions of the present invention (αCD20-scFv::SLT-1A)₂ and (αCD20-scFv::SLT-1A)ₙ₊₂ showed potent, cell-targeted cytotoxicity specifically to CD20-expressing cells.

[0492] To further investigate these unexpected results, the protein compositions αCD20-scFv::SLT-1A and (αCD20-scFv::SLT-1A)₂ were mixed together to form new compositions to test the cytotoxic potency of their constituent CD20-binding proteins as a function of the ratio of CD20-binding protein constituents. The (αCD20-scFv::SLT-1A)₂ composition comprised 100% multivalent CD20-binding protein of the total protein present and 79% of that multivalent CD20-binding protein was bivalent CD20-binding protein (see Table 1, supra). The αCD20-scFv::SLT-1A composition comprised 95% monovalent CD20-binding protein of the total protein present (see Table 1, supra). Increasingly larger samples of the multivalent CD20-binding molecule composition (αCD20-scFv::SLT-1A)₂ were added to samples of the monovalent CD20-binding protein composition αCD20-scFv::SLT-1A to create a series of mixed samples with total protein concentration ratios of 1:3, 1:1, and 3:1 of the (αCD20-scFv::SLT-1A)₂ composition to the αCD20-scFv::SLT-1A composition. Samples of the fixed-ratio, mixed samples, along with samples of the original, unmixed αCD20-scFv::SLT-1A and (αCD20-scFv::SLT-1A)₂ compositions, were tested using the CD20+ cell-kill assay as described above to determine each sample's CD₅₀ value to CD20-expressing cells (ST486). The results are shown in FIG. 7, FIG. 8, and Table 5. along with the results for the unmixed αCD20-scFv::SLT-1A and (αCD20-scFv::SLT-1A)₂ compositions. In addition, none of these samples exhibited cytotoxicity toward CD20 negative cells using this assay at the concentrations tested (FIG. 9).

TABLE 5
Cytotoxicity: Representative half-maximal cytotoxic concentrations
(CD₅₀) for the multivalent (αCD20-scFv::SLT-1A)2 composition
diluted with increasingly more of the monovalent
αCD20-scFv::SLT-1A composition

| Protein | CD₅₀ (ng/mL) |
|---|---|
| 1:0 (αCD20-scFv::SLT-1A)₂ | 61.5 |
| 3:1 (αCD20-scFv::SLT-1A)₂ to αCD20-scFv::SLT-1A | 74.9 |
| 1:1 (αCD20-scFv::SLT-1A)₂ to αCD20-scFv::SLT-1A | 108.0 |
| 1:3 (αCD20-scFv::SLT-1A)₂ to αCD20-scFv::SLT-1A | 213.0 |
| 0:1 αCD20-scFv::SLT-1A | 967.0 |
| unpurified (αCD20-scFv::SLT-1A)₂ | 142.0 |

[0493] FIG. 7 shows the CD20+ cell-kill assay results for the exemplary, multivalent CD20-binding molecule composition of the present invention (αCD20-scFv::SLT-1A)₂, the monovalent CD20-binding protein composition αCD20-scFv::SLT-1A and the “unpurified” protein composition (αCD20-scFv::SLT-1A)ₙ described above before any copper sulfate oxidation step.

[0494] FIG. 8 shows the CD20+ cell-kill assay results for the fixed-ratio mixtures of a 1:3 protein concentration ratio of (αCD20-scFv::SLT-1A)₂ to αCD20-scFv::SLT-1A, a 1:1 protein concentration ratio of (αCD20-scFv::SLT-1A)₂ to αCD20-scFv::SLT-1A, and a 3:1 protein concentration ratio of (αCD20-scFv::SLT-1A)₂ to αCD20-scFv::SLT-1A, along with the original, multivalent CD20-binding protein composition (αCD20-scFv::SLT-1A)₂.

[0495] Table 5 reports the CD₅₀ values for samples of the purified (αCD20-scFv::SLT-1A)₂ composition, the mixture of a 1:3 protein concentration ratio of (αCD20-scFv::SLT-1A)₂ to αCD20-scFv::SLT-1A, the mixture of a 1:1 protein concentration ratio of (αCD20-scFv::SLT-1A)₂ to αCD20-scFv::SLT-1A, the mixture of a 3:1 protein concentration ratio of (αCD20-scFv::SLT-1A)₂ to αCD20-scFv::SLT-1A, and “unpurified” (αCD20-scFv::SLT-1A)ₙ. Table 5 shows the cytotoxicity of the purified, multivalent CD20-binding molecule composition (αCD20-scFv::SLT-1A)₂ to CD20-expressing cells was about 16 times greater than the cytotoxicity of the purified, monovalent CD20-binding protein composition αCD20-scFv::SLT-1A to CD20-expressing cells. Table 5 shows the (αCD20-scFv::SLT-1A)₂ composition was about 2.3 times more cytotoxic than the “unpurified” (αCD20-scFv::SLT-1A)ₙ composition from which the (αCD20-scFv::SLT-1A)₂ composition was purified.

[0496] The CD₅₀ values in Table 5 were graphed as a function of the percentage of (αCD20-scFv::SLT-1A)₂ composition protein of the total protein in the sample tested, and a straight line was fitted to the data points using a simple linear regression, statistical model (FIG. 10). The coefficient of determination (“R squared”) of the line fit was 0.8424. In FIG. 11, the CD₅₀ values represented in Table 5 were graphed as a function of the percentage of (αCD20-scFv::SLT-1A)₂ composition protein of the total protein in the sample.

[0497] The results reported in Table 5, FIG. 10, and FIG. 11 show that as the multivalent CD20-binding protein composition (αCD20-scFv::SLT-1A)₂ was diluted with the monovalent CD20-binding protein composition αCD20-scFv::SLT-1A, the cytotoxicity of the mixed CD20-binding protein samples was reduced, such as, e.g., by 4-fold or greater, as assayed by CD₅₀ values measured with the CD20+ cell-kill assay. FIGS. 10 and 11 show that as the relative protein concentration of the multivalent CD20-binding protein composition (αCD20-scFv::SLT-1A)₂ increases over the total CD20-binding protein concentration, the cytotoxic potency of the mixture to CD20+ cells increased (represented by lower CD₅₀ values). The cytotoxicity of the (αCD20-scFv::SLT-1A)₂ composition to CD20+ cells was diluted in linear manner by the addition of more and more of the monovalent CD20-binding protein composition αCD20-scFv::SLT-1A (see FIGS. 8, 10, and 11). Thus, for achieving more maximal cytotoxicity of a multivalent CD20-binding protein composition of the present invention, the amount of any monovalent CD20-binding protein (e.g., αCD20-scFv::SLT-1A or (αCD20-scFv::SLT-1A)ₙ where n=1) or the relative proportion monovalent CD20-binding protein to total CD20-binding protein should be minimized or eliminated because a monovalent CD20-binding protein represents a cytotoxicity-lowering constituent of the composition, such as, e.g., by functioning as a non-cytotoxic impurity or a constituent having significantly lower cytotoxicity than a multivalent CD20-binding molecule comprising it as a component.

[0498] Considering that the in vitro, ribosome inhibitory activities of both monovalent and multivalent variants of the CD20-binding protein compositions were similar (see Table 3), it was expected that changes in CD20-expressing cell binding caused by differences in CD20-binding valency would account for any differences in cytotoxic potency between monovalent and multivalent CD20-binding protein. However, the lack of cytotoxic potency of the monovalent CD20-binding protein composition αCD20-scFv::SLT-1A as compared to the (αCD20-scFv::SLT-1A)₂ composition cannot be explained merely by the difference in CD20+ cell-binding between the αCD20-scFv::SLT-1A composition and the (αCD20-scFv::SLT-1A)₂ composition (see Table 2 and FIG. 4).

[0499] Using the same cell-kill assay, the fixed-ratio mixtures of CD20-binding protein compositions were analyzed for cytotoxicity to CD20 negative H929 cells (FIG. 9). The CD₅₀ values of the mixture of a 1:3 protein concentration ratio of (αCD20-scFv::SLT-1A)₂ to αCD20-scFv::SLT-1A, the mixture of a 1:1 protein concentration ratio of (αCD20-scFv::SLT-1A)₂ to αCD20-scFv::SLT-1A, and the mixture of a 3:1 protein concentration ratio of (αCD20-scFv::SLT-1A)₂ to αCD20-scFv::SLT-1A to target negative cells were not calculable because of the shape of the curve produced by the dilution series. Thus, the fixed-ratio mixtures were not cytotoxicity to CD20 negative cells at the concentrations tested; whereas, each ratio tested showed some levels of targeted cytotoxicity to CD20+ cells (Table 5; FIG. 9).

[0500] In addition, CD20+ cell-kill assays were performed as described above to test the cytotoxicity of protein compositions comprising purified, catalytically inactive, bivalent CD20-binding protein. Protein compositions, which comprised multivalent CD20-binding protein, were produced as described above for the purification and production of the composition (αCD20-scFv::SLT-1A)₂. The Shiga toxin effector polypeptide regions of the CD20-binding proteins of these compositions were catalytically inactive or catalytically impaired due to the presence of the mutation(s) E167D, Y77S, or Y77S/E167D in their Shiga toxin effector regions. The multivalent CD20-binding proteins of these compositions comprised the monovalent CD20-binding protein αCD20-scFv::SLT-1A (SEQ ID NO:54) with at least one of the mutations noted above for studying the role of catalytic activity. The catalytically inactive variants of the multivalent CD20-binding proteins were not cytotoxic at the concentrations tested. Without being bound by theory, the requirement for a catalytically active, Shiga toxin effector region for cell-killing by multivalent CD20-binding molecules of this Example showed the mechanism of cytotoxicity of certain, multivalent CD20-binding molecule of this invention, and compositions thereof, 1) is Shiga toxin effector region dependent, 2) requires the Shiga toxin activity of ribosome inactivation within the target cell, and 3) does not involve any other cytotoxic effect of the multivalent CD20-binding molecule independent of Shiga toxin effector catalytic activity (i.e., no other cytotoxic effect of the multivalent CD20-binding molecule (e.g., a Shiga toxin effector region-independent, extracellular, cytotoxic effect) was observed in the assays of this Example at the protein concentrations tested in the absence of Shiga toxin effector region catalytic activity.

### E. Determining Relative Proportions of Multivalent CD20-Binding Molecules in Exemplary Compositions of the Present Invention

[0501] Chromatographic and/or electrophoretic methods known to the skilled worker were used to determine 1) relative protein concentration ratios of different CD20-binding proteins within exemplary compositions of the present invention.

[0502] In this Example, SEC analyses were used to analyze the amount of proteinaceous species of different sizes present in exemplary compositions of the present invention, e.g., the ratios and/or percentages between monovalent, bivalent, and higher-order multivalent CD20-binding species were calculated.

[0503] SEC analyses were performed using the following assays. Samples were loaded onto a fast protein liquid chromatography (FPLC) column and buffer was flowed through the column while the absorbance at 280 nm of the eluted materials was recorded in mAU. Using the same column and setup, molecules of known sizes and migration characteristics (standards) were analyzed in order to calibrate which retention times corresponded to which protein sizes and/or protein sizes were predicted from the amino acid composition of each monovalent CD20-binding protein monomer present in the composition to be analyzed. Chromatographic data collected from commercial size standards were used to create calibration curves to help estimate sizes of molecular species in samples and focus analyses on specific retention time ranges. In certain instances of high purity, the total protein quantity for a given composition was estimated using the absorbance measurement at 280 nm from a SEC analysis, the predicted molecular weight of the majority molecular species present, and the extinction coefficient of that majority species.

[0504] In addition, SDS-PAGE and/or capillary gel electrophoretic analyses of both reduced and non-reduced samples was used to verify the sizes, estimate the relative quantities, and detect any disulfide bond, multimeric associations present in the molecular species of a given size or peak (see e.g. FIG. 3). For example, the size of a molecule in a SEC peak can be estimated based on non-reducing SDS-PAGE analysis of chromatographic fractions collected at retention times within that peak's retention duration.

[0505] In this Example, all the multivalent CD20-binding proteins in the exemplary compositions of the present invention consisted essentially of multimeric forms of monovalent CD20-binding protein. Thus, peaks and bands corresponding to species: 1) the same size of the monovalent CD20-binding protein were composed of monovalent CD20-binding molecule, 2) twice as large as the monovalent CD20-binding protein were composed of bivalent CD20-binding molecule(s), 3) three times as large as the monovalent CD20-binding protein were composed of trivalent CD20-binding molecule(s), and so forth.

[0506] Some SEC analyses involved assays performed with an ÄKTA system (GE Healthcare, Little Chalfont, Buckinghamshire, U.K.). UNICORN™ control software (GE Healthcare, Little Chalfont, Buckinghamshire, U.K.) was used to calculate the protein concentration percentages of different sized-species using the software's peak integration functions, which included baseline calculation, determination of the start and end of peaks, the retention time and the area under the curve. The identity of the CD20-binding protein species represented by a peak in the 280 nm trace from a chromatographic analysis were manually assigned based on the expected retention time determined using calibration standards (e.g. a gel filtration standard like GE Healthcare Life Science's product 28-4038-42 Gel Filtration HMW Calibration Kit).

[0507] Other SEC analyses involved a similar assay performed with a Waters system (Waters Corp., Milford, Mass., U.S.). SEC analysis was performed using a Waters Alliance HPLC system running Water Empower 2 software (Waters Corp., Milford, Mass., U.S.). The HPLC system included an analytical TSKgel G3000SW_{XL} size-exclusion column and a TSKgel Guard SW_{XL} size-exclusion guard column (Tosoh Bioscience LLC, King of Prussia, Pa., U.S.). Prior to use, the columns were equilibrated with mobile phase (20 mM sodium phosphate, 500 mM sodium chloride, pH 7.4) for at least thirty minutes at a flow rate of 0.5 mL per minute (mL/min). A blank sample of 100 μL of mobile phase was run through the columns to check the system was clean and working properly. Then composition samples were analyzed, including samples of known protein size standards (e.g. a commercially available, gel filtration standard like GE Healthcare Life Science's product 28-4038-42 Gel Filtration HMW Calibration Kit). For each composition sample, 50 μg of protein was injected and an isocratic pump was run for thirty minutes at a flow-rate of 0.5 mL per minute though the columns at a temperature of 22° C.

[0508] The percentages of multivalent CD20-binding molecule present in three, different, exemplary compositions of the present invention were analyzed by SEC using the Waters system (see FIG. 12A, FIG. 12B, and FIG. 12C), and the respective results of these analyses are shown in Tables 6-8. In this Example for the Waters system, a retention time of (1) about 19 to 20 minutes represented a molecular size equivalent to dimeric, bivalent CD20-binding protein (αCD20-scFv::SLT-1A)₂; (2) about 20 to 22 minutes represented a molecular size equivalent to the monomeric, monovalent CD20-binding protein αCD20-scFv::SLT-1A; (3) about 17 to 17.5 minutes represented a molecular size equivalent to multimeric CD20-binding proteins which were trivalent or tetravalent; and 4) about 17 minutes represented a molecular size equivalent to multimeric, hexavalent CD20-binding protein. The percent purity of the dimeric, bivalent CD20-binding protein (αCD20-scFv::SLT-1A)₂ was calculated from its peak area divided by the total peak area of all peaks from 14 to 27 minutes. The percentage of each peak to all peaks (Percent Area of Total) was determined using the sum of all peak areas as the denominator as shown in the following formula: (area under the curve of the peak of interest)/(sum of all areas under all peaks)×100.

TABLE 6
SEC Analysis of Exemplary, Multivalent CD20-Binding Molecule
Composition #1

| Peak | Peak Retention | Peak Height | | Percent Area |
|---|---|---|---|---|
| Number | Time (minutes) | (AU) | Peak Area | of Total (%) |
| #1 | 17.12 | 11,120 | 870,189 | 8.79 |
| #2 | 17.55 | 11,947 | 546,273 | 5.52 |
| #3 | 19.30 | 162,857 | 7,713,993 | 77.88 |
| #4 | 20.65 | 14,999 | 774,762 | 7.82 |

TABLE 7
SEC Analysis of Exemplary, Multivalent CD20-Binding Molecule
Composition #2

| Peak | Peak Retention | Peak Height | | Percent Area |
|---|---|---|---|---|
| Number | Time (minutes) | (AU) | Peak Area | of Total (%) |
| #1 | 17.49 | 9,138 | 597,819 | 7.51 |
| #2 | 19.32 | 148,854 | 7,003,742 | 87.95 |
| #3 | 20.87 | 6,418 | 361,658 | 4.54 |

TABLE 8
SEC Analysis of Exemplary, Multivalent CD20-Binding Molecule
Composition #3

| Peak | Peak Retention | Peak Height | | Percent Area |
|---|---|---|---|---|
| Number | Time (minutes) | (AU) | Peak Area | of Total (%) |
| #1 | 17.57 | 7,148 | 381,654 | 4.74 |
| #2 | 19.52 | 128,928 | 7,264,891 | 90.26 |
| #3 | 20.87 | 8,268 | 402,467 | 5.00 |

[0509] The results of the Percent Area of Total calculations shown in Tables 6-8 are based on the SEC profile data shown in FIGS. 12A, 12B, and 12C. Table 6 shows the results for one, exemplary, multivalent CD20-binding molecule composition of the present invention having a bivalent CD20-binding protein percentage of total protein of approximately 78%, as well as comprising about 8% monovalent CD20-binding protein and 14% relatively large valence, CD20-binding protein of the total protein. Table 7 shows the results for a second, exemplary, multivalent CD20-binding molecule composition of the present invention having a bivalent CD20-binding protein percentage of total protein approximately 88%, as well as comprising about 4.5% monovalent CD20-binding protein and 7.5% relatively large valence, CD20-binding protein of the total protein. Table 8 shows the results for an exemplary, multivalent CD20-binding molecule composition of the present invention having a bivalent CD20-binding protein percentage of total protein of approximately 90%, as well as comprising about 5% monovalent CD20-binding protein and 5% relatively large valence, CD20-binding protein of the total protein.

[0510] One exemplary, multivalent CD20-binding molecule composition of the present invention (“multivalent CD20-binding molecule composition #1”) was analyzed 59 different times over an eighteen-month period using the SEC-HPLC, Waters system assay described above. The peak areas and total peak area were determined using the software analysis as described above with the minimum retention time set around 14 minutes (near the exclusion limit where molecules are too large to have any significant probability of penetrating the fractionation gel) and the maximum retention time set around 22-27 minutes, depending on calibration measurements of gel filtration standard markers and the multivalent CD20-binding molecule composition's solvent, which is near when molecules of sizes smaller than polypeptides flow off the column. The resulting empirical measurements produced a data set (n=59) describing peak #3 (bivalent CD20-binding protein of the present invention) area to total peak (total protein) area (Percent Area of Total) with a mean of 77.40(%), a median of 77.72(%), a mode of 76.10(%), a standard deviation of 1.533, and a relative standard deviation of 1.982. An exemplary, individual analysis of the exemplary, multivalent CD20-binding molecule composition #1 is shown in Table 6 and FIG. 12A.

F. Determining the In Vivo Effects of Multivalent CD20-Binding Molecule Compositions (αCD20-scFv::SLT-1A)₂ and (αCD20-scFv::SLT-1A)ₙ₊₂ Using Animal Models

[0511] Using methods known to the skilled worker, animal models are used to determine the in vivo effects of the exemplary compositions (αCD20-scFv::SLT-1A)₂ and (αCD20-scFv::SLT-1A)ₙ₊₂ on CD20+ neoplastic and/or immune cells (see e.g. WO 2014/164680). Various mice strains are used to test the effects of the multivalent CD20-binding molecules of the present invention, and compositions thereof, after intravenous administration on xenograft tumors in mice resulting from the injection into those mice of human neoplastic cells which express CD20 on at least one of their cell surfaces. Non-human primates are used to test the effects of the multivalent CD20-binding molecule compositions on CD20+B-cell populations after intravenous administration.

### Summary

[0512] Surprisingly, multivalent CD20-binding molecules of the present invention, which each comprise cell-targeting, CD20 binding regions and Shiga toxin A subunit effector polypeptide regions, exhibit an unexpected improvement in CD20-expressing cell-kill activity compared to their monovalent protein component.

[0513] Given their similar ribosome inactivation activities, it was expected that differences in cytotoxic potencies between monovalent and multivalent variants would be predominantly if not completely explained by differences in the variants' abilities to binding CD20-expressing cells. The difference in K_{D} values for binding CD20-expressing cells between the bivalent CD20-binding molecule composition (CD20-scFv::SLT-1A)₂ of this Example and the monovalent CD20-binding protein composition αCD20-scFv::SLT-1A was about 3-fold with the bivalent CD20-binding molecule composition exhibiting the lower K_{D} value or about a three times greater binding affinity (Table 2; FIG. 4). Thus, if cytotoxic potency of CD20-binding molecule was directly related to the K_{D} of cell binding, then the cytotoxicity of the monovalent CD20-binding protein composition was predicted to be at most 3-fold less cytotoxic to CD20+ cells than the exemplary, bivalent CD20-binding molecule composition—meaning the expected CD₅₀ value of the monovalent CD20-binding protein should be no more than about three times the CD₅₀ value of the exemplary, bivalent CD20-binding molecule composition.

[0514] However, it was discovered instead that the monovalent CD20-binding protein composition did not exhibit a cytotoxicity within ten-fold of the cytotoxicity of compositions of multivalent CD20-binding molecules having that same monovalent CD20-binding protein as its only component. Surprisingly, the difference in cytotoxicity was qualitatively increased as by the assay described above, and this cytotoxic difference, while over ten-fold, has yet to be accurately quantified. Without being bound by theory, the increased cytotoxicity of the multivalent CD20-binding protein compositions of this Example might be caused by a qualitative change in the ability of multivalent CD20-binding molecules compared to monovalent CD20-binding molecules to do one or more of the following: 1) internalize into CD20-expressing cells, such as, e.g., with relatively great efficiency; 2) intracellular route to subcellular compartment(s) favorable for effectuating Shiga toxin effector polypeptide mediated cytotoxicity, such as, e.g., with relatively great efficiency; and/or 3) delivery of Shiga toxin effector polypeptides to the cytosol of cell in which the multivalent CD20-binding molecule is present, such as, e.g., with relatively great efficiency.

### Example 2. Multivalent CD20-Binding Molecules Derived from Shiga Toxins and Various Immunoglobulin-Type Binding Regions, and Enriched Compositions Thereof

[0515] In this Example, exemplary compositions of the present invention are created with multivalent CD20-binding proteins derived from Shiga toxin. A Shiga toxin effector region is derived from the A subunit of Shiga-like Toxin 1 (SLT-1A) (SEQ ID NO:1), Shiga toxin (StxA) (SEQ ID NO:2), and/or Shiga-like Toxin 2 (SLT-2A) (SEQ ID NO:3) or chosen from a Shiga toxin effector known in the art (see e.g., WO 2005/092917, WO 2007/033497, US 2013/196928, WO 2014/164680, WO 2014/164693, WO 2015/113005, WO 2015/113007, WO 2015/138435, WO 2015/138452, US 2015/259428, WO 2015/191764, and US 2016/0177284, each of which is incorporated herein by reference in its entirety). An immunoglobulin-type binding region is derived from the CD20-binding molecule chosen from Table 9 and which binds an extracellular part of CD20. The exemplary, multivalent CD20-binding molecules of this Example are created using techniques known in the art and/or as described in the previous Example. In addition, exemplary compositions enriched for these exemplary, multivalent CD20-binding molecules relative to monovalent CD20-binding molecule(s) are created using techniques known in the art and/or as described in the previous Example such that the compositions have a concentration ratio of monovalent CD20-binding molecule to total CD20-binding molecule concentration of less than one to three. The exemplary, multivalent CD20-binding molecules, and compositions thereof, of this Example are tested as described in the previous Example and/or using assays known to the skilled worker.

TABLE 9
Exemplary CD20 Binding Domains
Source of CD20 Binding Domain

| | |
|---|---|
| monoclonal antibody 1F5 and derivatives | See e.g. Golay J et al., J |
| such as, e.g., humanized variants and | Immunol 135: 3795-801 (1985); |
| immunoglobulin-derived binding domains | Press O et al., Blood 69: 584-91 |
| like scFvs | (1987) |
| monoclonal antibody 1H4 and derivatives | See e.g. Haisma H et al., Blood |
| such as, e.g., humanized variants and | 92: 184-90 (1998) |
| immunoglobulin-derived binding domains | |
| like scFvs | |
| monoclonal antibody 1K1791 and derivatives | See e.g. Nishida M et al., Intl J |
| such as, e.g., humanized variants and | Oncol 32: 1263-74 (2008) |
| immunoglobulin-derived binding domains | |
| like scFvs | |
| monoclonal antibody 2B8, Leu16, Leuδ, and | See e.g. Reff M et al., Blood 83: |
| derivatives such as, e.g., humanized variants | 435-45 (1994); Maloney D et al., |
| and immunoglobulin-derived binding | Blood 84: 2457-66 (1994); WO |
| domains like scFvs | 2005016969 |
| monoclonal antibody 2F2 and derivatives | See e.g. Teeling J et al., Blood |
| such as, e.g., humanized variants and | 104: 1793-800 (2004) |
| immunoglobulin-derived binding domains | |
| like scFvs | |
| monoclonal antibody 2H7 and derivatives | See e.g. Liu A et al., Proc Natl |
| such as, e.g., humanized variants and | Arad Sci 84: 3439-43 (1987); |
| immunoglobulin-derived binding domains | Polyak M et al., Blood 99: 3256- |
| like scFvs | 62 (2002); Nickerson-Nutter C |
| | et al., Rheumatology 50:1033- |
| | 44 (2011) |
| monoclonal antibody 7D8 and derivatives | See e.g. Teeling J et al., Blood |
| such as, e.g., humanized variants and | 104: 1793-800 (2004) |
| immunoglobulin-derived binding domains | |
| like scFvs | |
| monoclonal antibody 8E4 and derivatives | Wu L et al., Cancer Lett 292: |
| such as, e.g., humanized variants and | 208-14 (2010) |
| immunoglobulin-derived binding domains | |
| like scFvs | |
| monoclonal antibody 11B8 and derivatives | See e.g. Boross P et al., |
| such as, e.g., humanized variants and | Haematologica 96: 1822-30 |
| immunoglobulin-derived binding domains | (2011) |
| like scFvs | |
| monoclonal antibody AME-133v, | See e.g. Robak T, Robak E, |
| LY2469298, and derivatives such as, e.g., | BioDrugs 25: 13-25 (2011) |
| humanized variants and immunoglobulin- | |
| derived binding domains like scFvs | |
| antibodies recognizing the phosphor-CD20 | See e.g. Golay J et al., J |
| antigen B1, B-ly1 and derivatives such as, | Immunol 135: 3795-801 (1985); |
| e.g., humanized variants and. | Tedder T et al., Eur J Immunol |
| immunoglobulin-derived binding domains | 16: 881-7 (1986); Cardarelli Pet |
| like scFvs | al., Cancer Immunol |
| | Immunother 51: 15-24 (2002); |
| | U.S. Pat. No. 5,843,398 |
| monoclonal antibody B9E9 and derivatives | See e.g. Schultz J et al., Cancer |
| such as, e.g., humanized variants and | Res 60: 6663-9 (2000) |
| immunoglobulin-derived binding domains | |
| like scFvs | |
| BM-ca and derivatives such as, e.g., | See e.g. Kobayashi H et al., |
| humanized variants and immunoglobulin- | Cancer Med 2: 130-43 (2013) |
| derived binding domains like scFvs ( | |
| monoclonal antibody C2B8 and derivatives | See e.g. Reff M et al., Blood 83: |
| such as, e.g., humanized variants and | 435-45 (1994) |
| immunoglobulin-derived binding domains | |
| like scFvs | |
| monoclonal antibody CKI and derivatives | See e.g. Hooijberg E et al., |
| such as, e.g., humanized variants and | Cancer Res 55: 840-6 (1995); |
| immunoglobulin-derived binding domains | Hooijberg E et al., Hybridoma |
| like scFvs | 15: 23-31 (1996) |
| GA101, R05072759, and derivatives such as, | See e.g. Mössner E et al., Blood |
| e.g., humanized variants and | 115: 4393-402 (2010); Alduaij |
| immunoglobulin-derived binding domains | W et al., Blood 117: 4519-29 |
| like scFvs | (2011); Robak T, Robak E, |
| | BioDrugs 25: 13-25 (2011); |
| | Salles Get al., Blood 119: 5126- |
| | 32 (2012) |
| monoclonal antibody LT20 and derivatives | See e.g. de Boer O et al., PLoS |
| such as, e.g., humanized variants and | One 2: e779 (2007) |
| immunoglobulin-derived binding domains | |
| like scFvs | |
| ibritumomab and derivatives such as, e.g., | See e.g. Wiseman G et al., Clin |
| humanized variants and immunoglobulin- | Cancer Res 5: 3281s-3286s |
| derived binding domains like scFvs | (1999); Cang S et al., J Hematol |
| | Oncol 5: 64 (2012) |
| monoclonal antibodies HB20-1-25, MB20-1- | See e.g. WO2005000901 |
| 18 and derivatives such as, e.g., humanized | |
| variants and immunoglobulin-derived | |
| binding domains like scFvs | |
| obinutuzumab and derivatives such as, e.g., | See e.g. Mössner E et al., Blood |
| humanized variants and immunoglobulin- | 115: 4393-402 (2010); Robak T, |
| derived binding domains like scFvs | Robak E, BioDrugs 25: 13-25 |
| | (2011); Salles G et al., Blood |
| | 119: 5126-32 (2012); Golay J et |
| | al., Blood 122: 3482-91 (2013) |
| ocaratuzumab and derivatives such as, e.g., | Cang S et al., J Hematol Oncol |
| humanized variants and immunoglobulin- | 5: 64 (2012) |
| derived binding domains like scFvs | |
| ocrelizumab, PRO70769, arid derivatives | See e.g. Morschhauser F et al., |
| such as, e.g., humanized variants and | Ann Oncol 21: 1870-6 (2010); |
| immunoglobulin-derived binding domains | Cang S et al., J Hematol Oncol |
| like scFvs | 5: 64 (2012) |
| ofatumumab and derivatives such as, e.g, | See e.g. Hagenbeek A et al., |
| immunoglobulin-derived binding domains | Blood 111: 5486-95 (2008); |
| like scFvs | Cang S et al., J Hematol Oncol |
| | 5: 64(2012) |
| monoclonal antibodies OUBM1-OUBM8 | See e.g. Uchiyama S et al., |
| | Cancer Sci 101: 201-9 (2010) |
| monoclonal antibody PRO131921 and | See e.g. Robak T, Robak E, |
| derivatives such as, e.g., humanized variants | BioDrugs 25: 13-25 (2011); |
| and immunoglobulin-derived binding | Cang S et al., J Hematol Oncol |
| domains like scFvs | 5: 64 (2012) |
| rituximab and derivatives such as, e.g., | See e.g. Reff M et al., Blood 83: |
| humanized variants and immunoglobulin- | 435-45 (1994); Anderson D et |
| derived binding domains like scFvs | al., Biochem Soc Trans 25: 705- |
| | 8 (1997); Golay J et al., Blood |
| | 122: 3482-91 (2013); Kinder M |
| | et al., J Biol Chem 288: 3084-54 |
| | (2013); Zhang H et al., Cell |
| | Physiol Biochem 32: 645-54 |
| | (2013); Ahmadzadeh V et al., |
| | Protein Expr Purif 102: 45-41 |
| | (2014) |
| antibody TGLA and derivatives such as, e.g., | See e.g. Lv M et al., Cancer Lett |
| humanized variants and immunoglobulin- | 294: 66-73 (2010) |
| derived binding domains like scFvs | |
| tositumomab and derivatives such as, e.g., | See e.g. Cheson B, Curr Opin |
| humanized variants and immunoglobulin- | Investig Drugs 3: 165-70 (2002) |
| derived binding domains like scFvs | |
| TRU-015 and derivatives such as, e.g., | See e.g. Burge D et al., Clin |
| humanized variants, scPv variants, and CDRs | Ther 30: 1806-16 (2008); Robak |
| | T, Robak E, BioDrugs 25: 13-25 |
| | (2011)) |
| ublituximab and derivativessuch as, e.g., | See e.g. Abdelwahed R et al., |
| humanized variants and immunoglobulin- | Invest Ophthalmol Vis Sci 54: |
| derived binding domains like scFvs | 3657-65 (2013); Garff-Tavernier |
| | M et al., Leukemia 28: 230-3 |
| | (2014) |
| veltuzumab, IMMU-106, hA20, and | See e.g. Morschhauser F et al., J |
| derivatives such as, e.g., humanized variants | Clin Oncol 27: 3346-53 (2009); |
| and immunoglobulin-derived binding | Cang S et al., J Hematol Oncol |
| domains like scFvs | 5: 64 (2012); Ellbrecht C et al., |
| | JAMA Dermatol 1939 (2014) |
| CD20 binding scFv(s) and derivatives such | See e.g. Geng S et al., Cell Mol |
| as, e.g., HL23, scFv-1, scFv-3, scFv-5, and | Immunol 3: 439-43 (2006); |
| scFv-8 | Olafesn T et al., Protein Eng |
| | Des Sel 23: 243-9 (2010); Fang |
| | H et al., Sci China Life Sci 54: |
| | 255-62 (2011) |
| various CD20 binding antibodies, antigen | See e.g. Lim S et al., |
| binding portions thereof, and derivatives such | Haematologica 95: 135-43 |
| as, e.g., humanized variants and | (2010); U.S. 4,861,579; |
| immunoglobulin-derived binding domains | U.S. 5,500,362; U.S. 5,595,721; |
| like scFvs | U.S. 5,677,180; U.S. 5,721,108; |
| | U.S. 5,736,137; U.S. 5,776,456; |
| | U.S. 5,843,398; U.S. 5,849,898; |
| | U.S. 6,015,542; U.S. 6,090,365; |
| | U.S. 6,120,767; U.S. 6,171,586; |
| | U.S. 6,194,551; U.S. 6,224,866; |
| | U.S. 6,242,195; U.S. 6,287,537; |
| | U.S. 6,306,393; U.S. 6,368,596; |
| | U.S. 6,399,061; U.S. 6,410,391; |
| | U.S. 6,455,043; U.S. 6,528,624; |
| | U.S. 6,538,124; U.S. 6,565,827; |
| | U.S. 6,652,852; U.S. 6,682,734; |
| | U.S. 7,879,984; U.S. 8,101,179; |
| | U.S. 8,153,125; U.S. 8,337,844; |
| | WO95/03770; WO98/58964; |
| | WO99/22764; WO00/09160; |
| | WO00/27428; WO00/27433; |
| | WO00/42072; WO00/44788; |
| | WO00/67795; WO00/67796; |
| | WO00/76542; WO01/03734; |
| | WO01/10460; WO01/10461; |
| | WO01/10462; WO01/13945; |
| | WO01/72333; WO01/80884; |
| | WO01/97858; WO02/060955; |
| | WO02/079255; WO02/096948; |
| | WO02/102312; WO03/002607; |
| | WO03/061694; |
| | WO2004/032828; |
| | WO2005/000901; |
| | WO2006/106959; |
| | WO2009031230; |
| | WO2014076292 |
| CD20 binding, fibronectin domain FN3_{CD20} | See e.g. Nataraj an A et al., Clin |
| based on the fibronectin-derived 10^{th} | Cancer Res 19: 6820-9 (2013); |
| fibronectin type III domain as an alternative | |
| scaffold to antibody binding domains | |
| monoclonal antibodies which bind to various | US 2011/0091483; US 12/0941,583; |
| mammalian CD20 antigens | PCT/U52010/055826; EP20140151932; |
| | PCT/GB2012/052532; US 13/048,135; |
| | EP20140151932; PCT/GB2012/052532; |
| | US 13/048,135; PCT/US2006/046034 |
| nucleic acids which can be used to generate | U.S. 8,097,713; US 12/0965956 |
| anti-CD20 antibodies, antigen binding | |
| fragments, and derivatives thereof | |

[0516] While some embodiments of the invention have been described by way of illustration, it will be apparent that the invention may be put into practice with many modifications, variations and adaptations, and with the use of numerous equivalents or alternative solutions that are within the scope of persons skilled in the art, without departing from the spirit of the invention or exceeding the scope of the claims.

[0517] All publications, patents, and patent applications are herein incorporated by reference in their entirety to the same extent as if each individual publication, patent or patent application was specifically and individually indicated to be incorporated by reference in its entirety. The patent application publications WO 2005/092917, WO 2007/033497, US 2013/196928, WO 2014/164680, WO 2014/164693, WO 2015/113005, WO 2015/113007, WO 2015/138435, WO 2015/138452, US 2015/0259428, WO 2015/191764, US 2016/0126950 and US 2016/0177284 are each incorporated herein by reference in its entirety. The disclosures of U.S. provisional patent applications 61/777,130, 62/112,314, and 62/249,193 are each incorporated herein by reference in its entirety. The complete disclosures of all electronically available biological sequence information from GenBank (National Center for Biotechnology Information, U.S.) for amino acid and nucleotide sequences cited herein are each incorporated herein by reference in its entirety.

The invention is claimed as follows:

1. A multivalent CD20-binding molecule comprising
a) two or more CD20 binding regions, each capable of specifically binding an extracellular part of a CD20, and
b) one or more Shiga toxin effector polypeptides.

2. The multivalent CD20-binding molecule of claim 1, whereby administration of the multivalent CD20-binding molecule to a CD20 positive cell results in one or more of:
i) internalization of the multivalent CD20-binding molecule inside the cell, optionally in five hours, four hours, three hours, two hours, one hour, or thirty minutes at about 37 degrees Celsius;
ii) subcellular routing of a Shiga toxin effector polypeptide to the cell's cytosol;
iii) disruption of ribosome function within the cell; and
iv) killing of the cell.

3. The multivalent CD20-binding molecule of claim 1, which is multimeric and comprises or consists essentially of:
(a) two polypeptides, each having the amino acid sequence of any one of SEQ ID NOs: 47-175 and 249-304, and each polypeptide optionally further comprising an amino-terminal methionine residue; and
(b) a cysteine disulfide bond linking the two polypeptides, wherein the cysteine disulfide bond involves a cysteine residue in each of the two polypeptides located at amino acid position 242, 482, 483, 484, 490, 491, 492, 493, 494, 495, 499, 500, 501, 502, 503, 504, 505, 510, 511, 512, 513, or 521.

4. The multivalent CD20-binding molecule of claim 3, which is a homodimer and consists essentially of
(a) two identical polypeptides each having the amino acid sequence selected from any one of SEQ ID NOs: 47-175 and 249-304; and
(b) a cysteine disulfide bond linking the two identical polypeptides, wherein the cysteine disulfide bond involves a cysteine residue in each of the two identical polypeptides located at amino acid position 242, 482, 483, 484, 490, 491, 492, 493, 494, 495, 499, 500, 501, 502, 503, 504, 505, 510, 511, 512, 513, or 521.

5. The multivalent CD20-binding molecule of claim 4, wherein the two identical polypeptides each has the amino acid sequence shown in SEQ ID NO:49; and wherein the disulfide bond is between cysteine residues at amino acid position 490.

6. The multivalent CD20-binding molecule of claim 4, wherein the two identical polypeptides each has the amino acid sequence shown in any one of SEQ ID NO:50, SEQ ID NO:61, SEQ ID NO:73, SEQ ID NO:96, SEQ ID NO:101, or SEQ ID NO:102; and wherein the disulfide bond is between cysteine residues at amino acid position 501.

7. The multivalent CD20-binding molecule of claim 4, wherein the two identical polypeptides each has the amino acid sequence selected from any one of SEQ ID NO:53, SEQ ID NO:63, SEQ ID NO:66, SEQ ID NO:75, SEQ ID NO:83, SEQ ID NO:89, or SEQ ID NO:95; and wherein the disulfide bond is between cysteine residues at amino acid position 512.

8. The multivalent CD20-binding molecule of claim 4, wherein the two identical polypeptides each has the amino acid sequence shown in SEQ ID NO:54; and wherein the disulfide bond is between cysteine residues at amino acid position 503.

9. The multivalent CD20-binding molecule of claim 4, wherein the two identical polypeptides each has the amino acid sequence selected from any one of SEQ ID NO:55, SEQ ID NO:64, SEQ ID NO:67, SEQ ID NO:76, SEQ ID NO:90, SEQ ID NO:92, SEQ ID NO:93, SEQ ID NO:97, or SEQ ID NO:98; and wherein the disulfide bond is between cysteine residues at amino acid position 502.

10. The multivalent CD20-binding molecule of claim 4, wherein the two identical polypeptides each has the amino acid sequence selected from any one of SEQ ID NO:56, SEQ ID NO:68, SEQ ID NO:91, SEQ ID NO:99, SEQ ID NO:103, or SEQ ID NO:104; and wherein the disulfide bond is between cysteine residues at amino acid position 492.

11. The multivalent CD20-binding molecule of claim 4, wherein the two identical polypeptides each has the amino acid sequence selected from any one of SEQ ID NO:57, SEQ ID NO:69, SEQ ID NO:78, SEQ ID NO:82, SEQ ID NO:84, SEQ ID NO:87, SEQ ID NO:88, SEQ ID NO:94, SEQ ID NO:110, SEQ ID NO:111, or SEQ ID NO:115; and wherein the disulfide bond is between cysteine residues at amino acid position 503.

12. The multivalent CD20-binding molecule of claim 4, wherein the two identical polypeptides are selected from any one SEQ ID NO:58, SEQ ID NO:70, or SEQ ID NO:81; and wherein the disulfide bond is between cysteine residues at amino acid position 493.

13. The multivalent CD20-binding molecule of claim 4, wherein the two identical polypeptides are selected from any one of the polypeptides shown in SEQ ID NOs: 249-304; and wherein the disulfide bond is between cysteine residues at amino acid position 242.

14. A composition comprising the multivalent CD20-binding molecule of any one of claims 1-13, wherein the composition comprises a ratio of monovalent CD20-binding molecule concentration to total CD20-binding molecule concentration of less than one to three, wherein each monovalent CD20-binding molecule
comprises only one CD20 binding region capable of specifically binding an extracellular part of a CD20 and
comprises a Shiga toxin effector region polypeptide.

15. The composition of claim 14, wherein the composition comprises the ratio of monovalent CD20-binding molecule concentration to total CD20-binding molecule concentration of less than: 1:5, 1:6, 1:7, 1:8, 1:9, 1:10, or 1:11.

16. A pharmaceutical composition comprising the multivalent CD20-binding molecule of any one of claims 1-13 or the composition of claims 14-15; and at least one pharmaceutically acceptable excipient or carrier.

17. The pharmaceutical composition of claim 16, wherein the excipient is:
acetate, alcohol, alpha-tocopherol, aluminum monostearate, ascorbic acid, ascorbyl palmitate, benzyl alcohol, butylated hydroxyanisole, butylated hydroxytoluene, chlorobutanol, citrate, cysteine hydrochloride, dextrose, ethanol, ethylenediaminetetraacetic acid, ethyloleate, gelatin, glycerine, glycerol, lactic acid, lecithin, mannitol, methyl parabens, monostearate salt, organic ester, paraben, phenol phosphate, phosphoric acid, polyalcohol, polyethylene glycol, polyol, propylene glycol, propylgallate, sodium bisulfate, sodium bisulfate, sodium chloride, sodium metabisulfite, sodium sulfite, sorbic acid, sorbitol, sugar, tartaric acid, or vegetable oil.

18. A kit comprising the composition of matter of any one of claims 1-17 and an additional reagent and/or pharmaceutical delivery device.

19. A method of killing a cell, the method of comprising the step of contacting the cell in vivo with the multivalent CD20-binding molecule of any one of claims 1-13, the composition of claims 14-15, or the pharmaceutical composition of any one of claims 16-17.

20. A method of treating a disease, disorder, or condition in a patient, the method comprising the step of administering to a patient in need thereof a therapeutically effective amount of the multivalent CD20-binding molecule of any one of claims 1-13, the composition of claims 14-15, or the pharmaceutical composition of any one of claims 16-17; optionally wherein the disease, disorder, or condition is selected from the group consisting of:
cancer, tumor, abnormal growth condition, immune disorder, hematologic cancer, leukemia, lymphoma, melanoma, myeloma, acute myeloid leukemia, acute non-lymphocytic leukemia, B-cell chronic lymphocytic leukemia, B-cell lymphoma, B-cell non-Hodgkin's lymphoma, B-cell precursor acute lymphoblastic leukemia, B-cell prolymphocytic leukemia, Burkitt's lymphoma, chronic lymphocytic leukemia, chronic myeloid leukemia, diffuse large B-cell lymphoma, follicular lymphoma, hairy cell leukemia, Hodgkin's lymphoma, immunoblastic large cell lymphoma, mantle cell lymphoma, multiple myeloma, nodular lymphocyte predominant Hodgkin's lymphoma, non-Hodgkin's lymphoma, plasmablastic lymphoma, plasma cell neoplasma, plasma cell myeloma, precursor B-lymphoblastic lymphoma, small lymphocytic lymphoma, T-cell large granular lymphocyte leukemia, T-cell lymphoma, T-cell prolymphocytic leukemia, Waldenstrom's macroglobulinemia, amyloidosis, ankylosing spondylitis, asthma, Crohn's disease, diabetes, graft rejection, graft-versus-host disease, Graves' disease, Graves' ophthalmopathy, Hashimoto's thyroiditis, hemolytic uremic syndrome, HIV-related disease, lupus erythematosus, multiple sclerosis, neuromyelitis optica spectrum disorders, N-methyl D-aspartate receptor encephalitis, opsoclonus myoclonus syndrome, paroxysmal nocturnal hemoglobinuria, polyarteritis nodosa, polyarthritis, psoriasis, psoriatic arthritis, rheumatoid arthritis, scleritis, scleroderma, septic shock, Sjörgren's syndrome, ulcerative colitis, and vasculitis.

The application's sequence listing, which the Patent Office published only in electronic form, follows.

SEQUENCE LISTING (304 sequences)

SEQ ID NO: 1 - protein, 293 aa, Escherichia coli
  source: /note="Shiga-like toxin 1 Subunit A (SLT-1A)"
KEFTLDFSTAKTYVDSLNVIRSAIGTPLQTISSGGTSLLMIDSGSGDNLFAVDVRGIDPEEGRFNNLRLIVERNNLYVTGFVNRTNNVFYRFADFSHVTFPGTTAVTLSGDSSYTTLQRVAGISRTGMQINRHSLTTSYLDLMSHSGTSLTQSVARAMLRFVTVTAEALRFRQIQRGFRTTLDDLSGRSYVMTAEDVDLTLNWGRLSSVLPDYHGQDSVRVGRISFGSINAILGSVALILNCHHHASRVARMASDEFPSMCPADGRVRGITHNKILWDSSTLGAILMRRTISS

SEQ ID NO: 2 - protein, 293 aa, Shigella dysenteriae
  source: /note="Shiga toxin Subunit A (StxA)"
KEFTLDFSTAKTYVDSLNVIRSAIGTPLQTISSGGTSLLMIDSGTGDNLFAVDVRGIDPEEGRFNNLRLIVERNNLYVTGFVNRTNNVFYRFADFSHVTFPGTTAVTLSGDSSYTTLQRVAGISRTGMQINRHSLTTSYLDLMSHSGTSLTQSVARAMLRFVTVTAEALRFRQIQRGFRTTLDDLSGRSYVMTAEDVDLTLNWGRLSSVLPDYHGQDSVRVGRISFGSINAILGSVALILNCHHHASRVARMASDEFPSMCPADGRVRGITHNKILWDSSTLGAILMRRTISS

SEQ ID NO: 3 - protein, 297 aa, Escherichia coli
  source: /note="Shiga-like toxin 2 Subunit A (SLT-2A)"
DEFTVDFSSQKSYVDSLNSIRSAISTPLGNISQGGVSVSVINHVLGGNYISLNVRGLDPYSERFNHLRLIMERNNLYVAGFINTETNIFYRFSDFSHISVPDVITVSMTTDSSYSSLQRIADLERTGMQIGRHSLVGSYLDLMEFRGRSMTRASSRAMLRFVTVIAEALRFRQIQRGFRPALSEASPLYTMTAQDVDLTLNWGRISNVLPEYRGEEGVRIGRISFNSLSAILGSVAVILNCHSTGSYSVRSVSQKQKTECQIVGDRAAIKVNNVLWEANTIAALLNRKPQDLTEPNQ

SEQ ID NO: 4 - protein, 251 aa, Artificial Sequence
  source: /note="Description of Artificial Sequence: Synthetic polypeptide"
  source: /note="Shiga toxin effector region SLT-1A"
KEFTLDFSTAKTYVDSLNVIRSAIGTPLQTISSGGTSLLMIDSGSGDNLFAVDVRGIDPEEGRFNNLRLIVERNNLYVTGFVNRTNNVFYRFADFSHVTFPGTTAVTLSGDSSYTTLQRVAGISRTGMQINRHSLTTSYLDLMSHSGTSLTQSVARAMLRFVTVTAEALRFRQIQRGFRTTLDDLSGRSYVMTAEDVDLTLNWGRLSSVLPDYHGQDSVRVGRISFGSINAILGSVALILNCHHHASRVAR

SEQ ID NO: 5 - protein, 10 aa, Artificial Sequence
  source: /note="Description of Artificial Sequence: Synthetic peptide"
  source: /note="Heavy chain CDR1"
GYTFTSYNMH

SEQ ID NO: 6 - protein, 17 aa, Artificial Sequence
  source: /note="Description of Artificial Sequence: Synthetic peptide"
  source: /note="Heavy chain CDR2"
AIYPGNGDTSYNQKFKG

SEQ ID NO: 7 - protein, 12 aa, Artificial Sequence
  source: /note="Description of Artificial Sequence: Synthetic peptide"
  source: /note="Heavy chain CDR3"
AQLRPNYWYFDV

SEQ ID NO: 8 - protein, 10 aa, Artificial Sequence
  source: /note="Description of Artificial Sequence: Synthetic peptide"
  source: /note="Light chain CDR1"
RASSSVSYMH

SEQ ID NO: 9 - protein, 7 aa, Artificial Sequence
  source: /note="Description of Artificial Sequence: Synthetic peptide"
  source: /note="Light chain CDR2"
ATSNLAS

SEQ ID NO: 10 - protein, 9 aa, Artificial Sequence
  source: /note="Description of Artificial Sequence: Synthetic peptide"
  source: /note="Light chain CDR3"
QQWISNPPT

SEQ ID NO: 11 - protein, 10 aa, Artificial Sequence
  source: /note="Description of Artificial Sequence: Synthetic peptide"
  source: /note="Heavy chain CDR1"
GYTFTSYNVH

SEQ ID NO: 12 - protein, 17 aa, Artificial Sequence
  source: /note="Description of Artificial Sequence: Synthetic peptide"
  source: /note="Heavy chain CDR2"
AIYPGNGDTSFNQKFKG

SEQ ID NO: 13 - protein, 14 aa, Artificial Sequence
  source: /note="Description of Artificial Sequence: Synthetic peptide"
  source: /note="Heavy chain CDR3"
SNYYGSSYVWFFDV

SEQ ID NO: 14 - protein, 10 aa, Artificial Sequence
  source: /note="Description of Artificial Sequence: Synthetic peptide"
  source: /note="Light chain CDR1"
RASSSVSYMD

SEQ ID NO: 15 - protein, 7 aa, Artificial Sequence
  source: /note="Description of Artificial Sequence: Synthetic peptide"
  source: /note="Light chain CDR2"
ATSNLAS

SEQ ID NO: 16 - protein, 9 aa, Artificial Sequence
  source: /note="Description of Artificial Sequence: Synthetic peptide"
  source: /note="Light chain CDR3"
QQWISNPPT

SEQ ID NO: 17 - protein, 10 aa, Artificial Sequence
  source: /note="Description of Artificial Sequence: Synthetic peptide"
  source: /note="Heavy chain CDR1"
GYTFTSYNMH

SEQ ID NO: 18 - protein, 17 aa, Artificial Sequence
  source: /note="Description of Artificial Sequence: Synthetic peptide"
  source: /note="Heavy chain CDR2"
AIYPGNGDTSYNQKFKG

SEQ ID NO: 19 - protein, 12 aa, Artificial Sequence
  source: /note="Description of Artificial Sequence: Synthetic peptide"
  source: /note="Heavy chain CDR3"
STYYGGDWYFNV

SEQ ID NO: 20 - protein, 10 aa, Artificial Sequence
  source: /note="Description of Artificial Sequence: Synthetic peptide"
  source: /note="Light chain CDR1"
RASSSVSYIH

SEQ ID NO: 21 - protein, 7 aa, Artificial Sequence
  source: /note="Description of Artificial Sequence: Synthetic peptide"
  source: /note="Light chain CDR2"
ATSNLAS

SEQ ID NO: 22 - protein, 9 aa, Artificial Sequence
  source: /note="Description of Artificial Sequence: Synthetic peptide"
  source: /note="Light chain CDR3"
QQWTSNPPT

SEQ ID NO: 23 - protein, 10 aa, Artificial Sequence
  source: /note="Description of Artificial Sequence: Synthetic peptide"
  source: /note="Heavy chain CDR1"
GFTFNDYAMH

SEQ ID NO: 24 - protein, 17 aa, Artificial Sequence
  source: /note="Description of Artificial Sequence: Synthetic peptide"
  source: /note="Heavy chain CDR2"
TISWNSGSIGYADSVKG

SEQ ID NO: 25 - protein, 13 aa, Artificial Sequence
  source: /note="Description of Artificial Sequence: Synthetic peptide"
  source: /note="Heavy chain CDR3"
DIQYGNYYYGMDV

SEQ ID NO: 26 - protein, 11 aa, Artificial Sequence
  source: /note="Description of Artificial Sequence: Synthetic peptide"
  source: /note="Light chain CDR1"
RASQSVSSYLA

SEQ ID NO: 27 - protein, 7 aa, Artificial Sequence
  source: /note="Description of Artificial Sequence: Synthetic peptide"
  source: /note="Light chain CDR2"
DASNRAT

SEQ ID NO: 28 - protein, 9 aa, Artificial Sequence
  source: /note="Description of Artificial Sequence: Synthetic peptide"
  source: /note="Light chain CDR3"
QQRSNWPIT

SEQ ID NO: 29 - protein, 10 aa, Artificial Sequence
  source: /note="Description of Artificial Sequence: Synthetic peptide"
  source: /note="Heavy chain CDR1"
GYTFTSYNMH

SEQ ID NO: 30 - protein, 17 aa, Artificial Sequence
  source: /note="Description of Artificial Sequence: Synthetic peptide"
  source: /note="Heavy chain CDR2"
AIYPGNGDTSYNQKFKG

SEQ ID NO: 31 - protein, 13 aa, Artificial Sequence
  source: /note="Description of Artificial Sequence: Synthetic peptide"
  source: /note="Heavy chain CDR3"
VVYYSNSYWYFDV

SEQ ID NO: 32 - protein, 10 aa, Artificial Sequence
  source: /note="Description of Artificial Sequence: Synthetic peptide"
  source: /note="Light chain CDR1"
RASSSVSYMH

SEQ ID NO: 33 - protein, 7 aa, Artificial Sequence
  source: /note="Description of Artificial Sequence: Synthetic peptide"
  source: /note="Light chain CDR2"
APSNLAS

SEQ ID NO: 34 - protein, 9 aa, Artificial Sequence
  source: /note="Description of Artificial Sequence: Synthetic peptide"
  source: /note="Light chain CDR3"
QQWSFNPPT

SEQ ID NO: 35 - protein, 10 aa, Artificial Sequence
  source: /note="Description of Artificial Sequence: Synthetic peptide"
  source: /note="Heavy chain CDR1"
GYAFSYSWIN

SEQ ID NO: 36 - protein, 17 aa, Artificial Sequence
  source: /note="Description of Artificial Sequence: Synthetic peptide"
  source: /note="Heavy chain CDR2"
RIFPGDGDTDYNGKFKG

SEQ ID NO: 37 - protein, 10 aa, Artificial Sequence
  source: /note="Description of Artificial Sequence: Synthetic peptide"
  source: /note="Heavy chain CDR3"
NVFDGYWLVY

SEQ ID NO: 38 - protein, 16 aa, Artificial Sequence
  source: /note="Description of Artificial Sequence: Synthetic peptide"
  source: /note="Light chain CDR1"
RSSKSLLHSNGITYLY

SEQ ID NO: 39 - protein, 7 aa, Artificial Sequence
  source: /note="Description of Artificial Sequence: Synthetic peptide"
  source: /note="Light chain CDR2"
QMSNLVS

SEQ ID NO: 40 - protein, 9 aa, Artificial Sequence
  source: /note="Description of Artificial Sequence: Synthetic peptide"
  source: /note="Light chain CDR3"
AQNLELPYT

SEQ ID NO: 41 - protein, 16 aa, Artificial Sequence
  source: /note="Description of Artificial Sequence: Synthetic peptide"
  source: /note="Linker 1"
EFPKPSTPPGSSGGAP

SEQ ID NO: 42 - protein, 7 aa, Artificial Sequence
  source: /note="Description of Artificial Sequence: Synthetic peptide"
  source: /note="Linker 2"
GGGGSGG

SEQ ID NO: 43 - protein, 25 aa, Artificial Sequence
  source: /note="Description of Artificial Sequence: Synthetic peptide"
  source: /note="Linker 3"
GGGGSGGGGSGGGGSGGGGSGGGGS

SEQ ID NO: 44 - protein, 15 aa, Artificial Sequence
  source: /note="Description of Artificial Sequence: Synthetic peptide"
  source: /note="Linker 4"
GSTSGSGKPGSGEGS

SEQ ID NO: 45 - protein, 5 aa, Artificial Sequence
  source: /note="Description of Artificial Sequence: Synthetic peptide"
  source: /note="Linker 5"
GGGGS

SEQ ID NO: 46 - protein, 9 aa, Artificial Sequence
  source: /note="Description of Artificial Sequence: Synthetic peptide"
  source: /note="Linker extension"
GILGFVFTL

SEQ ID NO: 47 - protein, 523 aa, Artificial Sequence
  source: /note="Description of Artificial Sequence: Synthetic polypeptide"
  source: /note="Multivalent CD20-binding molecule component 1"
  MISC_FEATURE (510)..(510): /note="Cys residue at this position is available to form a homodimer or heterodimer via a disulfide bond with any of SEQ ID NOS 47-175"
QVQLVQSGAELVKPGASVKMSCKASGYTFTSYNMHWVKQTPGQGLEWIGAIYPGNGDTSYNQKFKGKATLTADKSSSTAYMQLSSLTSEDSAVYYCARAQLRPNYWYFDVWGAGTTVTVSSGGGGSGGGGSGGGGSGGGGSGGGGSDIVLSQSPAILSASPGEKVTMTCRASSSVSYMHWYQQKPGSSPKPWIYATSNLASGVPARFSGSGSGTSYSLTISRVEAEDAATYYCQQWISNPPTFGAGTKLELKEFPKPSTPPGSSGGAPKEFTLDFSTAKTYVDSLNVIRSAIGTPLQTISSGGTSLLMIDSGSGDNLFAVDVRGIDPEEGRFNNLRLIVERNNLYVTGFVNRTNNVFYRFADFSHVTFPGTTAVTLSGDSSYTTLQRVAGISRTGMQINRHSLTTSYLDLMSHSGTSLTQSVARAMLRFVTVTAEALRFRQIQRGFRTTLDDLSGRSYVMTAEDVDLTLNWGRLSSVLPDYHGQDSVRVGRISFGSINAILGSVALILNCHHHASRVARKDEL

SEQ ID NO: 48 - protein, 509 aa, Artificial Sequence
  source: /note="Description of Artificial Sequence: Synthetic polypeptide"
  source: /note="Multivalent CD20-binding molecule component 2"
  MISC_FEATURE (500)..(500): /note="Cys residue at this position is available to form a homodimer or heterodimer via a disulfide bond with any of SEQ ID NOS 47-175"
QVQLVQSGAELVKPGASVKMSCKASGYTFTSYNMHWVKQTPGQGLEWIGAIYPGNGDTSYNQKFKGKATLTADKSSSTAYMQLSSLTSEDSAVYYCARAQLRPNYWYFDVWGAGTTVTVSSGSTSGSGKPGSGEGSDIVLSQSPAILSASPGEKVTMTCRASSSVSYMHWYQQKPGSSPKPWIYATSNLASGVPARFSGSGSGTSYSLTISRVEAEDAATYYCQQWISNPPTFGAGTKLELKEFPKPSTPPGSSGGAPKEFTLDFSTAKTYVDSLNVIRSAIGTPLQTISSGGTSLLMIDSGSGDNLFAVDVRGIDPEEGRFNNLRLIVERNNLYVTGFVNRTNNVFYRFADFSHVTFPGTTAVTLSGDSSYTTLQRVAGISRTGMQINRHSLTTSYLDLMSHSGTSLTQSVARAMLRFVTVTAEALRFRQIQRGFRTTLDDLSGRSYVMTAEDVDLTLNWGRLSSVLPDYHGQDSVRVGRISFGSINAILGSVALILNCHHHASRVAR

SEQ ID NO: 49 - protein, 499 aa, Artificial Sequence
  source: /note="Description of Artificial Sequence: Synthetic polypeptide"
  source: /note="Multivalent CD20-binding molecule component 3"
  MISC_FEATURE (490)..(490): /note="Cys residue at this position is available to form a homodimer or heterodimer via a disulfide bond with any of SEQ ID NOS 47-175"
QVQLVQSGAELVKPGASVKMSCKASGYTFTSYNMHWVKQTPGQGLEWIGAIYPGNGDTSYNQKFKGKATLTADKSSSTAYMQLSSLTSEDSAVYYCARAQLRPNYWYFDVWGAGTTVTVSSGGGGSDIVLSQSPAILSASPGEKVTMTCRASSSVSYMHWYQQKPGSSPKPWIYATSNLASGVPARFSGSGSGTSYSLTISRVEAEDAATYYCQQWISNPPTFGAGTKLELKEFPKPSTPPGSSGGAPKEFTLDFSTAKTYVDSLNVIRSAIGTPLQTISSGGTSLLMIDSGTGDNLFAVDVRGIAPEEGRFNNLRLIVERNNLYVTGFVNRTNNVFYRFADFSHVTFPGTTAVTLSADSSYTTLQRVAGISRTGMQINRHSLTTSYLDLMSHSATSLTQSVARAMLRFVTVTAEALRFRQIQRGFRTTLDDLSGASYVMTAEDVDLTLNWGRLSSVLPDYHGQDSVRVGRISFGSINAILGSVALILNCHHHASRVAR

SEQ ID NO: 50 - protein, 510 aa, Artificial Sequence
  source: /note="Description of Artificial Sequence: Synthetic polypeptide"
  source: /note="Multivalent CD20-binding molecule component 4"
  MISC_FEATURE (501)..(501): /note="Cys residue at this position is available to form a homodimer or heterodimer via a disulfide bond with any of SEQ ID NOS 47-175"
QVQLVQSGAELVKPGASVKMSCKASGYTFTSYNMHWVKQTPGQGLEWIGAIYPGNGDTSYNQKFKGKATLTADKSSSTAYMQLSSLTSEDSAVYYCARAQLRPNYWYFDVWGAGTTVTVSSGGGGSGGGGSGGGGSGGGGSGGGGSDIVLSQSPAILSASPGEKVTMTCRASSSVSYMHWYQQKPGSSPKPWIYATSNLASGVPARFSGSGSGTSYSLTISRVEAEDAATYYCQQWISNPPTFGAGTKLELKGGGGSGGKEFTLDFSTAKTYVDSLNVIRSAIGTPLQTISSGGTSLLMIDSGSGDNLFAVDVRGIAPEEGRFNNLRLIVERNNLYVTGFVNRTNNVFYRFADFSHVTFPGTTAVTLSADSSYTTLQRVAGISRTGMQINRHSLTTSYLDLMSHSATSLTQSVARAMLRFVTVTAEALRFRQIQRGFRTTLDDLSGASYVMTAEDVDLTLNWGRLSSVLPDYHGQDSVRVGRISFGSINAILGSVALILNCHHHASRVAR

SEQ ID NO: 51 - protein, 500 aa, Artificial Sequence
  source: /note="Description of Artificial Sequence: Synthetic polypeptide"
  source: /note="Multivalent CD20-binding molecule component 5"
  MISC_FEATURE (491)..(491): /note="Cys residue at this position is available to form a homodimer or heterodimer via a disulfide bond with any of SEQ ID NOS 47-175"
QVQLVQSGAELVKPGASVKMSCKASGYTFTSYNMHWVKQTPGQGLEWIGAIYPGNGDTSYNQKFKGKATLTADKSSSTAYMQLSSLTSEDSAVYYCARAQLRPNYWYFDVWGAGTTVTVSSGSTSGSGKPGSGEGSDIVLSQSPAILSASPGEKVTMTCRASSSVSYMHWYQQKPGSSPKPWIYATSNLASGVPARFSGSGSGTSYSLTISRVEAEDAATYYCQQWISNPPTFGAGTKLELKGGGGSGGKEFTLDFSTAKTYVDSLNVIRSAIGTPLQTISSGGTSLLMIDNLVPMVATVVDVRGIDPEEGRFNNLRLIVERNNLYVTGFVNRTNNVFYRFADFSHVTFPGTTAVTLSGDSSYTTLQRVAGISRTGMQINRHSLTTSYLDLMSHSGTSLTQSVARAMLRFVTVTAEALRFRQIQRGFRTTLDDLSGRSYVMTAEDVDLTLNWGRLSSVLPDYHGQDSVRVGRISFGSINAILGSVALILNCHHHASRVAR

SEQ ID NO: 52 - protein, 508 aa, Artificial Sequence
  source: /note="Description of Artificial Sequence: Synthetic polypeptide"
  source: /note="Multivalent CD20-binding molecule component 6"
  MISC_FEATURE (499)..(499): /note="Cys residue at this position is available to form a homodimer or heterodimer via a disulfide bond with any of SEQ ID NOS 47-175"
QVQLVQSGAELVKPGASVKMSCKASGYTFTSYNMHWVKQTPGQGLEWIGAIYPGNGDTSYNQKFKGKATLTADKSSSTAYMQLSSLTSEDSAVYYCARAQLRPNYWYFDVWGAGTTVTVSSGGGGSDIVLSQSPAILSASPGEKVTMTCRASSSVSYMHWYQQKPGSSPKPWIYATSNLASGVPARFSGSGSGTSYSLTISRVEAEDAATYYCQQWISNPPTFGAGTKLELKEFPKPSTPPGSSGGAPGILGFVFTLKEFTLDFSTAKTYVDSLNVIRSAIGTPLQTISSGGTSLLMIDSGSGDNLFAVDVRGIDPEEGRFNNLRLIVERNNLYVTGFVNRTNNVFYRFADFSHVTFPGTTAVTLSGDSSYTTLQRVAGISRTGMQINRHSLTTSYLDLMSHSGTSLTQSVARAMLRFVTVTAEALRFRQIQRGFRTTLDDLSGRSYVMTAEDVDLTLNWGRLSSVLPDYHGQDSVRVGRISFGSINAILGSVALILNCHHHASAVAA

SEQ ID NO: 53 - protein, 521 aa, Artificial Sequence
  source: /note="Description of Artificial Sequence: Synthetic polypeptide"
  source: /note="Multivalent CD20-binding molecule component 7"
  MISC_FEATURE (512)..(512): /note="Cys residue at this position is available to form a homodimer or heterodimer via a disulfide bond with any of SEQ ID NOS 47-175"
QVQLQQPGAELVKPGASVKMSCKTSGYTFTSYNVHWVKQTPGQGLEWIGAIYPGNGDTSFNQKFKGKATLTADKSSSTVYMQLSSLTSEDSAVYYCARSNYYGSSYVWFFDVWGAGTTVTVSSGGGGSGGGGSGGGGSGGGGSGGGGSQIVLSQSPTILSASPGEKVTMTCRASSSVSYMDWYQQKPGSSPKPWIYATSNLASGVPARFSGSGSGTSYSLTISRVEAEDAATYYCQQWISNPPTFGAGTKLELKEFPKPSTPPGSSGGAPKEFTLDFSTAKTYVDSLNVIRSAIGTPLQTISSGGTSLLMIDSGSGDNLFAVDVRGIDPEEGRFNNLRLIVERNNLYVTGFVNRTNNVFYRFADFSHVTFPGTTAVTLSGDSSYTTLQRVAGISRTGMQINRHSLTTSYLDLMSHSGTSLTQSVARAMLRFVTVTAEALRFRQIQRGFRTTLDDLSGRSYVMTAEDVDLTLNWGRLSSVLPDYHGQDSVRVGRISFGSINAILGSVALILNCHHHASRVAR

SEQ ID NO: 54 - protein, 512 aa, Artificial Sequence
  source: /note="Description of Artificial Sequence: Synthetic polypeptide"
  source: /note="Multivalent CD20-binding molecule component 8"
  MISC_FEATURE (503)..(503): /note="Cys residue at this position is available to form a homodimer or heterodimer via a disulfide bond with any of SEQ ID NOS 47-175"
MQVQLQQPGAELVKPGASVKMSCKTSGYTFTSYNVHWVKQTPGQGLEWIGAIYPGNGDTSFNQKFKGKATLTADKSSSTVYMQLSSLTSEDSAVYYCARSNYYGSSYVWFFDVWGAGTTVTVSSGSTSGSGKPGSGEGSQIVLSQSPTILSASPGEKVTMTCRASSSVSYMDWYQQKPGSSPKPWIYATSNLASGVPARFSGSGSGTSYSLTISRVEAEDAATYYCQQWISNPPTFGAGTKLELKEFPKPSTPPGSSGGAPKEFTLDFSTAKTYVDSLNVIRSAIGTPLQTISSGGTSLLMIDSGSGDNLFAVDVRGIDPEEGRFNNLRLIVERNNLYVTGFVNRTNNVFYRFADFSHVTFPGTTAVTLSGDSSYTTLQRVAGISRTGMQINRHSLTTSYLDLMSHSGTSLTQSVARAMLRFVTVTAEALRFRQIQRGFRTTLDDLSGRSYVMTAEDVDLTLNWGRLSSVLPDYHGQDSVRVGRISFGSINAILGSVALILNCHHHASRVAR

SEQ ID NO: 55 - protein, 511 aa, Artificial Sequence
  source: /note="Description of Artificial Sequence: Synthetic polypeptide"
  source: /note="Multivalent CD20-binding molecule component 9"
  MISC_FEATURE (502)..(502): /note="Cys residue at this position is available to form a homodimer or heterodimer via a disulfide bond with any of SEQ ID NOS 47-175"
QVQLQQPGAELVKPGASVKMSCKTSGYTFTSYNVHWVKQTPGQGLEWIGAIYPGNGDTSFNQKFKGKATLTADKSSSTVYMQLSSLTSEDSAVYYCARSNYYGSSYVWFFDVWGAGTTVTVSSGSTSGSGKPGSGEGSQIVLSQSPTILSASPGEKVTMTCRASSSVSYMDWYQQKPGSSPKPWIYATSNLASGVPARFSGSGSGTSYSLTISRVEAEDAATYYCQQWISNPPTFGAGTKLELKEFPKPSTPPGSSGGAPKEFTLDFSTAKTYVDSLNVIRSAIGTPLQTISSGGTSLLMIDSGSGDNLFAVDVRGIDPEEGRFNNLRLIVERNNLYVTGFVNRTNNVFYRFADFSHVTFPGTTAVTLSGDSSYTTLQRVAGISRTGMQINRHSLTTSYLDLMSHSGTSLTQSVARAMLRFVTVTAEALRFRQIQRGFRTTLDDLSGRSYVMTAEDVDLTLNWGRLSSVLPDYHGQDSVRVGRISFGSINAILGSVALILNCHHHASRVAR

SEQ ID NO: 56 - protein, 501 aa, Artificial Sequence
  source: /note="Description of Artificial Sequence: Synthetic polypeptide"
  source: /note="Multivalent CD20-binding molecule component 10"
  MISC_FEATURE (492)..(492): /note="Cys residue at this position is available to form a homodimer or heterodimer via a disulfide bond with any of SEQ ID NOS 47-175"
QVQLQQPGAELVKPGASVKMSCKTSGYTFTSYNVHWVKQTPGQGLEWIGAIYPGNGDTSFNQKFKGKATLTADKSSSTVYMQLSSLTSEDSAVYYCARSNYYGSSYVWFFDVWGAGTTVTVSSGGGGSQIVLSQSPTILSASPGEKVTMTCRASSSVSYMDWYQQKPGSSPKPWIYATSNLASGVPARFSGSGSGTSYSLTISRVEAEDAATYYCQQWISNPPTFGAGTKLELKEFPKPSTPPGSSGGAPKEFTLDFSTAKTYVDSLNVIRSAIGTPLQTISSGGTSLLMIDSGSGDNLFAVDVRGIDPEEGRFNNLRLIVERNNLYVTGFVNRTNNVFYRFADFSHVTFPGTTAVTLSGDSSYTTLQRVAGISRTGMQINRHSLTTSYLDLMSHSGTSLTQSVARAMLRFVTVTAEALRFRQIQRGFRTTLDDLSGRSYVMTAEDVDLTLNWGRLSSVLPDYHGQDSVRVGRISFGSINAILGSVALILNCHHHASRVAR

SEQ ID NO: 57 - protein, 512 aa, Artificial Sequence
  source: /note="Description of Artificial Sequence: Synthetic polypeptide"
  source: /note="Multivalent CD20-binding molecule component 11"
  MISC_FEATURE (503)..(503): /note="Cys residue at this position is available to form a homodimer or heterodimer via a disulfide bond with any of SEQ ID NOS 47-175"
QVQLQQPGAELVKPGASVKMSCKTSGYTFTSYNVHWVKQTPGQGLEWIGAIYPGNGDTSFNQKFKGKATLTADKSSSTVYMQLSSLTSEDSAVYYCARSNYYGSSYVWFFDVWGAGTTVTVSSGGGGSGGGGSGGGGSGGGGSGGGGSQIVLSQSPTILSASPGEKVTMTCRASSSVSYMDWYQQKPGSSPKPWIYATSNLASGVPARFSGSGSGTSYSLTISRVEAEDAATYYCQQWISNPPTFGAGTKLELKGGGGSGGKEFTLDFSTAKTYVDSLNVIRSAIGTPLQTISSGGTSLLMIDSGSGDNLFAVDVRGIDPEEGRFNNLRLIVERNNLYVTGFVNRTNNVFYRFADFSHVTFPGTTAVTLSGDSSYTTLQRVAGISRTGMQINRHSLTTSYLDLMSHSGTSLTQSVARAMLRFVTVTAEALRFRQIQRGFRTTLDDLSGRSYVMTAEDVDLTLNWGRLSSVLPDYHGQDSVRVGRISFGSINAILGSVALILNCHHHASRVAR

SEQ ID NO: 58 - protein, 502 aa, Artificial Sequence
  source: /note="Description of Artificial Sequence: Synthetic polypeptide"
  source: /note="Multivalent CD20-binding molecule component 12"
  MISC_FEATURE (493)..(493): /note="Cys residue at this position is available to form a homodimer or heterodimer via a disulfide bond with any of SEQ ID NOS 47-175"
QVQLQQPGAELVKPGASVKMSCKTSGYTFTSYNVHWVKQTPGQGLEWIGAIYPGNGDTSFNQKFKGKATLTADKSSSTVYMQLSSLTSEDSAVYYCARSNYYGSSYVWFFDVWGAGTTVTVSSGSTSGSGKPGSGEGSQIVLSQSPTILSASPGEKVTMTCRASSSVSYMDWYQQKPGSSPKPWIYATSNLASGVPARFSGSGSGTSYSLTISRVEAEDAATYYCQQWISNPPTFGAGTKLELKGGGGSGGKEFTLDFSTAKTYVDSLNVIRSAIGTPLQTISSGGTSLLMIDSGSGDNLFAVDVRGIDPEEGRFNNLRLIVERNNLYVTGFVNRTNNVFYRFADFSHVTFPGTTAVTLSGDSSYTTLQRVAGISRTGMQINRHSLTTSYLDLMSHSGTSLTQSVARAMLRFVTVTAEALRFRQIQRGFRTTLDDLSGRSYVMTAEDVDLTLNWGRLSSVLPDYHGQDSVRVGRISFGSINAILGSVALILNCHHHASRVAR

SEQ ID NO: 59 - protein, 530 aa, Artificial Sequence
  source: /note="Description of Artificial Sequence: Synthetic polypeptide"
  source: /note="Multivalent CD20-binding molecule component 13"
  MISC_FEATURE (521)..(521): /note="Cys residue at this position is available to form a homodimer or heterodimer via a disulfide bond with any of SEQ ID NOS 47-175"
QVQLQQPGAELVKPGASVKMSCKTSGYTFTSYNVHWVKQTPGQGLEWIGAIYPGNGDTSFNQKFKGKATLTADKSSSTVYMQLSSLTSEDSAVYYCARSNYYGSSYVWFFDVWGAGTTVTVSSGGGGSGGGGSGGGGSGGGGSGGGGSQIVLSQSPTILSASPGEKVTMTCRASSSVSYMDWYQQKPGSSPKPWIYATSNLASGVPARFSGSGSGTSYSLTISRVEAEDAATYYCQQWISNPPTFGAGTKLELKEFPKPSTPPGSSGGAPGILGFVFTLKEFTLDFSTAKTYVDSLNVIRSAIGTPLQTISSGGTSLLMIDSGSGDNLFAVDVRGIDPEEGRFNNLRLIVERNNLYVTGFVNRTNNVFYRFADFSHVTFPGTTAVTLSGDSSYTTLQRVAGISRTGMQINRHSLTTSYLDLMSHSGTSLTQSVARAMLRFVTVTAEALRFRQIQRGFRTTLDDLSGRSYVMTAEDVDLTLNWGRLSSVLPDYHGQDSVRVGRISFGSINAILGSVALILNCHHHASRVAR

SEQ ID NO: 60 - protein, 520 aa, Artificial Sequence
  source: /note="Description of Artificial Sequence: Synthetic polypeptide"
  source: /note="Multivalent CD20-binding molecule component 14"
  MISC_FEATURE (511)..(511): /note="Cys residue at this position is available to form a homodimer or heterodimer via a disulfide bond with any of SEQ ID NOS 47-175"
QVQLQQPGAELVKPGASVKMSCKTSGYTFTSYNVHWVKQTPGQGLEWIGAIYPGNGDTSFNQKFKGKATLTADKSSSTVYMQLSSLTSEDSAVYYCARSNYYGSSYVWFFDVWGAGTTVTVSSGSTSGSGKPGSGEGSQIVLSQSPTILSASPGEKVTMTCRASSSVSYMDWYQQKPGSSPKPWIYATSNLASGVPARFSGSGSGTSYSLTISRVEAEDAATYYCQQWISNPPTFGAGTKLELKEFPKPSTPPGSSGGAPGILGFVFTLKEFTLDFSTAKTYVDSLNVIRSAIGTPLQTISSGGTSLLMIDSGSGDNLFAVDVRGIDPEEGRFNNLRLIVERNNLYVTGFVNRTNNVFYRFADFSHVTFPGTTAVTLSGDSSYTTLQRVAGISRTGMQINRHSLTTSYLDLMSHSGTSLTQSVARAMLRFVTVTAEALRFRQIQRGFRTTLDDLSGRSYVMTAEDVDLTLNWGRLSSVLPDYHGQDSVRVGRISFGSINAILGSVALILNCHHHASRVAR

SEQ ID NO: 61 - protein, 510 aa, Artificial Sequence
  source: /note="Description of Artificial Sequence: Synthetic polypeptide"
  source: /note="Multivalent CD20-binding molecule component 15"
  MISC_FEATURE (501)..(501): /note="Cys residue at this position is available to form a homodimer or heterodimer via a disulfide bond with any of SEQ ID NOS 47-175"
QVQLQQPGAELVKPGASVKMSCKTSGYTFTSYNVHWVKQTPGQGLEWIGAIYPGNGDTSFNQKFKGKATLTADKSSSTVYMQLSSLTSEDSAVYYCARSNYYGSSYVWFFDVWGAGTTVTVSSGGGGSQIVLSQSPTILSASPGEKVTMTCRASSSVSYMDWYQQKPGSSPKPWIYATSNLASGVPARFSGSGSGTSYSLTISRVEAEDAATYYCQQWISNPPTFGAGTKLELKEFPKPSTPPGSSGGAPGILGFVFTLKEFTLDFSTAKTYVDSLNVIRSAIGTPLQTISSGGTSLLMIDSGSGDNLFAVDVRGIDPEEGRFNNLRLIVERNNLYVTGFVNRTNNVFYRFADFSHVTFPGTTAVTLSGDSSYTTLQRVAGISRTGMQINRHSLTTSYLDLMSHSGTSLTQSVARAMLRFVTVTAEALRFRQIQRGFRTTLDDLSGRSYVMTAEDVDLTLNWGRLSSVLPDYHGQDSVRVGRISFGSINAILGSVALILNCHHHASRVAR

SEQ ID NO: 62 - protein, 492 aa, Artificial Sequence
  source: /note="Description of Artificial Sequence: Synthetic polypeptide"
  source: /note="Multivalent CD20-binding molecule component 16"
  MISC_FEATURE (483)..(483): /note="Cys residue at this position is available to form a homodimer or heterodimer via a disulfide bond with any of SEQ ID NOS 47-175"
QVQLQQPGAELVKPGASVKMSCKTSGYTFTSYNVHWVKQTPGQGLEWIGAIYPGNGDTSFNQKFKGKATLTADKSSSTVYMQLSSLTSEDSAVYYCARSNYYGSSYVWFFDVWGAGTTVTVSSGGGGSQIVLSQSPTILSASPGEKVTMTCRASSSVSYMDWYQQKPGSSPKPWIYATSNLASGVPARFSGSGSGTSYSLTISRVEAEDAATYYCQQWISNPPTFGAGTKLELKGGGGSGGKEFTLDFSTAKTYVDSLNVIRSAIGTPLQTISSGGTSLLMIDSGTGDNLFAVDVRGIDPEEGRFNNLRLIVERNNLYVTGFVNRTNNVFYRFADFSHVTFPGTTAVTLSGDSSYTTLQRVAGISRTGMQINRHSLTTSYLDLMSHSGTSLTQSVARAMLRFVTVTAEALRFRQIQRGFRTTLDDLSGRSYVMTAEDVDLTLNWGRLSSVLPDYHGQDSVRVGRISFGSINAILGSVALILNCHHHASRVAR

SEQ ID NO: 63 - protein, 517 aa, Artificial Sequence
  source: /note="Description of Artificial Sequence: Synthetic polypeptide"
  source: /note="Multivalent CD20-binding molecule component 17"
  MISC_FEATURE (512)..(512): /note="Cys residue at this position is available to form a homodimer or heterodimer via a disulfide bond with any of SEQ ID NOS 47-175"
QVQLQQPGAELVKPGASVKMSCKTSGYTFTSYNVHWVKQTPGQGLEWIGAIYPGNGDTSFNQKFKGKATLTADKSSSTVYMQLSSLTSEDSAVYYCARSNYYGSSYVWFFDVWGAGTTVTVSSGGGGSGGGGSGGGGSGGGGSGGGGSQIVLSQSPTILSASPGEKVTMTCRASSSVSYMDWYQQKPGSSPKPWIYATSNLASGVPARFSGSGSGTSYSLTISRVEAEDAATYYCQQWISNPPTFGAGTKLELKEFPKPSTPPGSSGGAPKEFTLDFSTAKTYVDSLNVIRSAIGTPLQTISSGGTSLLMIDSGSGDNLFAVDVRGIAPEEGRFNNLRLIVERNNLYVTGFVNRTNNVFYRFADFSHVTFPGTTAVTLSADSSYTTLQRVAGISRTGMQINRHSLTTSYLDLMSHSATSLTQSVARAMLRFVTVTAEALRFRQIQRGFRTTLDDLSGASYVMTAEDVDLTLNWGRLSSVLPDYHGQDSVRVGRISFGSINAILGSVALILNCHHHAS

SEQ ID NO: 64 - protein, 511 aa, Artificial Sequence
  source: /note="Description of Artificial Sequence: Synthetic polypeptide"
  source: /note="Multivalent CD20-binding molecule component 18"
  MISC_FEATURE (502)..(502): /note="Cys residue at this position is available to form a homodimer or heterodimer via a disulfide bond with any of SEQ ID NOS 47-175"
QVQLQQPGAELVKPGASVKMSCKTSGYTFTSYNVHWVKQTPGQGLEWIGAIYPGNGDTSFNQKFKGKATLTADKSSSTVYMQLSSLTSEDSAVYYCARSNYYGSSYVWFFDVWGAGTTVTVSSGSTSGSGKPGSGEGSQIVLSQSPTILSASPGEKVTMTCRASSSVSYMDWYQQKPGSSPKPWIYATSNLASGVPARFSGSGSGTSYSLTISRVEAEDAATYYCQQWISNPPTFGAGTKLELKEFPKPSTPPGSSGGAPKEFTLDFSTAKTYVDSLNVIRSAIGTPLQTISSGGTSLLMIDNLVPMVATVVDVRGIDPEEGRFNNLRLIVERNNLYVTGFVNRTNNVFYRFADFSHVTFPGTTAVTLSGDSSYTTLQRVAGISRTGMQINRHSLTTSYLDLMSHSGTSLTQSVARAMLRFVTVTAEALRFRQIQRGFRTTLDDLSGRSYVMTAEDVDLTLNWGRLSSVLPDYHGQDSVRVGRISFGSINAILGSVALILNCHHHASRVAR

SEQ ID NO: 65 - protein, 526 aa, Artificial Sequence
  source: /note="Description of Artificial Sequence: Synthetic polypeptide"
  source: /note="Multivalent CD20-binding molecule component 19"
  MISC_FEATURE (521)..(521): /note="Cys residue at this position is available to form a homodimer or heterodimer via a disulfide bond with any of SEQ ID NOS 47-175"
QVQLQQPGAELVKPGASVKMSCKTSGYTFTSYNVHWVKQTPGQGLEWIGAIYPGNGDTSFNQKFKGKATLTADKSSSTVYMQLSSLTSEDSAVYYCARSNYYGSSYVWFFDVWGAGTTVTVSSGGGGSGGGGSGGGGSGGGGSGGGGSQIVLSQSPTILSASPGEKVTMTCRASSSVSYMDWYQQKPGSSPKPWIYATSNLASGVPARFSGSGSGTSYSLTISRVEAEDAATYYCQQWISNPPTFGAGTKLELKEFPKPSTPPGSSGGAPGILGFVFTLKEFTLDFSTAKTYVDSLNVIRSAIGTPLQTISSGGTSLLMIDSGSGDNLFAVDVRGIDPEEGRFNNLRLIVERNNLYVTGFVNRTNNVFYRFADFSHVTFPGTTAVTLSGDSSYTTLQRVAGISRTGMQINRHSLTTSYLDLMSHSGTSLTQSVARAMLRFVTVTAEALRFRQIQRGFRTTLDDLSGRSYVMTAEDVDLTLNWGRLSSVLPDYHGQDSVRVGRISFGSINAILGSVALILNCHHHAS

SEQ ID NO: 66 - protein, 525 aa, Artificial Sequence
  source: /note="Description of Artificial Sequence: Synthetic polypeptide"
  source: /note="Multivalent CD20-binding molecule component 20"
  MISC_FEATURE (512)..(512): /note="Cys residue at this position is available to form a homodimer or heterodimer via a disulfide bond with any of SEQ ID NOS 47-175"
QVQLQQPGAELVKPGASVKMSCKTSGYTFTSYNVHWVKQTPGQGLEWIGAIYPGNGDTSFNQKFKGKATLTADKSSSTVYMQLSSLTSEDSAVYYCARSNYYGSSYVWFFDVWGAGTTVTVSSGGGGSGGGGSGGGGSGGGGSGGGGSQIVLSQSPTILSASPGEKVTMTCRASSSVSYMDWYQQKPGSSPKPWIYATSNLASGVPARFSGSGSGTSYSLTISRVEAEDAATYYCQQWISNPPTFGAGTKLELKEFPKPSTPPGSSGGAPKEFTLDFSTAKTYVDSLNVIRSAIGTPLQTISSGGTSLLMIDSGSGDNLFAVDVRGIDPEEGRFNNLRLIVERNNLYVTGFVNRTNNVFYRFADFSHVTFPGTTAVTLSGDSSYTTLQRVAGISRTGMQINRHSLTTSYLDLMSHSGTSLTQSVARAMLRFVTVTAEALRFRQIQRGFRTTLDDLSGRSYVMTAEDVDLTLNWGRLSSVLPDYHGQDSVRVGRISFGSINAILGSVALILNCHHHASRVARKDEL

SEQ ID NO: 67 - protein, 515 aa, Artificial Sequence
  source: /note="Description of Artificial Sequence: Synthetic polypeptide"
  source: /note="Multivalent CD20-binding molecule component 21"
  MISC_FEATURE (502)..(502): /note="Cys residue at this position is available to form a homodimer or heterodimer via a disulfide bond with any of SEQ ID NOS 47-175"
QVQLQQPGAELVKPGASVKMSCKTSGYTFTSYNVHWVKQTPGQGLEWIGAIYPGNGDTSFNQKFKGKATLTADKSSSTVYMQLSSLTSEDSAVYYCARSNYYGSSYVWFFDVWGAGTTVTVSSGSTSGSGKPGSGEGSQIVLSQSPTILSASPGEKVTMTCRASSSVSYMDWYQQKPGSSPKPWIYATSNLASGVPARFSGSGSGTSYSLTISRVEAEDAATYYCQQWISNPPTFGAGTKLELKEFPKPSTPPGSSGGAPKEFTLDFSTAKTYVDSLNVIRSAIGTPLQTISSGGTSLLMIDSGSGDNLFAVDVRGIDPEEGRFNNLRLIVERNNLYVTGFVNRTNNVFYRFADFSHVTFPGTTAVTLSGDSSYTTLQRVAGISRTGMQINRHSLTTSYLDLMSHSGTSLTQSVARAMLRFVTVTAEALRFRQIQRGFRTTLDDLSGRSYVMTAEDVDLTLNWGRLSSVLPDYHGQDSVRVGRISFGSINAILGSVALILNCHHHASRVARKDEL

SEQ ID NO: 68 - protein, 505 aa, Artificial Sequence
  source: /note="Description of Artificial Sequence: Synthetic polypeptide"
  source: /note="Multivalent CD20-binding molecule component 22"
  MISC_FEATURE (492)..(492): /note="Cys residue at this position is available to form a homodimer or heterodimer via a disulfide bond with any of SEQ ID NOS 47-175"
QVQLQQPGAELVKPGASVKMSCKTSGYTFTSYNVHWVKQTPGQGLEWIGAIYPGNGDTSFNQKFKGKATLTADKSSSTVYMQLSSLTSEDSAVYYCARSNYYGSSYVWFFDVWGAGTTVTVSSGGGGSQIVLSQSPTILSASPGEKVTMTCRASSSVSYMDWYQQKPGSSPKPWIYATSNLASGVPARFSGSGSGTSYSLTISRVEAEDAATYYCQQWISNPPTFGAGTKLELKEFPKPSTPPGSSGGAPKEFTLDFSTAKTYVDSLNVIRSAIGTPLQTISSGGTSLLMIDSGSGDNLFAVDVRGIDPEEGRFNNLRLIVERNNLYVTGFVNRTNNVFYRFADFSHVTFPGTTAVTLSGDSSYTTLQRVAGISRTGMQINRHSLTTSYLDLMSHSGTSLTQSVARAMLRFVTVTAEALRFRQIQRGFRTTLDDLSGRSYVMTAEDVDLTLNWGRLSSVLPDYHGQDSVRVGRISFGSINAILGSVALILNCHHHASRVARKDEL

SEQ ID NO: 69 - protein, 516 aa, Artificial Sequence
  source: /note="Description of Artificial Sequence: Synthetic polypeptide"
  source: /note="Multivalent CD20-binding molecule component 23"
  MISC_FEATURE (503)..(503): /note="Cys residue at this position is available to form a homodimer or heterodimer via a disulfide bond with any of SEQ ID NOS 47-175"
QVQLQQPGAELVKPGASVKMSCKTSGYTFTSYNVHWVKQTPGQGLEWIGAIYPGNGDTSFNQKFKGKATLTADKSSSTVYMQLSSLTSEDSAVYYCARSNYYGSSYVWFFDVWGAGTTVTVSSGGGGSGGGGSGGGGSGGGGSGGGGSQIVLSQSPTILSASPGEKVTMTCRASSSVSYMDWYQQKPGSSPKPWIYATSNLASGVPARFSGSGSGTSYSLTISRVEAEDAATYYCQQWISNPPTFGAGTKLELKGGGGSGGKEFTLDFSTAKTYVDSLNVIRSAIGTPLQTISSGGTSLLMIDSGSGDNLFAVDVRGIDPEEGRFNNLRLIVERNNLYVTGFVNRTNNVFYRFADFSHVTFPGTTAVTLSGDSSYTTLQRVAGISRTGMQINRHSLTTSYLDLMSHSGTSLTQSVARAMLRFVTVTAEALRFRQIQRGFRTTLDDLSGRSYVMTAEDVDLTLNWGRLSSVLPDYHGQDSVRVGRISFGSINAILGSVALILNCHHHASRVARKDEL

SEQ ID NO: 70 - protein, 506 aa, Artificial Sequence
  source: /note="Description of Artificial Sequence: Synthetic polypeptide"
  source: /note="Multivalent CD20-binding molecule component 24"
  MISC_FEATURE (493)..(493): /note="Cys residue at this position is available to form a homodimer or heterodimer via a disulfide bond with any of SEQ ID NOS 47-175"
QVQLQQPGAELVKPGASVKMSCKTSGYTFTSYNVHWVKQTPGQGLEWIGAIYPGNGDTSFNQKFKGKATLTADKSSSTVYMQLSSLTSEDSAVYYCARSNYYGSSYVWFFDVWGAGTTVTVSSGSTSGSGKPGSGEGSQIVLSQSPTILSASPGEKVTMTCRASSSVSYMDWYQQKPGSSPKPWIYATSNLASGVPARFSGSGSGTSYSLTISRVEAEDAATYYCQQWISNPPTFGAGTKLELKGGGGSGGKEFTLDFSTAKTYVDSLNVIRSAIGTPLQTISSGGTSLLMIDSGSGDNLFAVDVRGIDPEEGRFNNLRLIVERNNLYVTGFVNRTNNVFYRFADFSHVTFPGTTAVTLSGDSSYTTLQRVAGISRTGMQINRHSLTTSYLDLMSHSGTSLTQSVARAMLRFVTVTAEALRFRQIQRGFRTTLDDLSGRSYVMTAEDVDLTLNWGRLSSVLPDYHGQDSVRVGRISFGSINAILGSVALILNCHHHASRVARKDEL

SEQ ID NO: 71 - protein, 534 aa, Artificial Sequence
  source: /note="Description of Artificial Sequence: Synthetic polypeptide"
  source: /note="Multivalent CD20-binding molecule component 25"
  MISC_FEATURE (521)..(521): /note="Cys residue at this position is available to form a homodimer or heterodimer via a disulfide bond with any of SEQ ID NOS 47-175"
QVQLQQPGAELVKPGASVKMSCKTSGYTFTSYNVHWVKQTPGQGLEWIGAIYPGNGDTSFNQKFKGKATLTADKSSSTVYMQLSSLTSEDSAVYYCARSNYYGSSYVWFFDVWGAGTTVTVSSGGGGSGGGGSGGGGSGGGGSGGGGSQIVLSQSPTILSASPGEKVTMTCRASSSVSYMDWYQQKPGSSPKPWIYATSNLASGVPARFSGSGSGTSYSLTISRVEAEDAATYYCQQWISNPPTFGAGTKLELKEFPKPSTPPGSSGGAPGILGFVFTLKEFTLDFSTAKTYVDSLNVIRSAIGTPLQTISSGGTSLLMIDSGSGDNLFAVDVRGIDPEEGRFNNLRLIVERNNLYVTGFVNRTNNVFYRFADFSHVTFPGTTAVTLSGDSSYTTLQRVAGISRTGMQINRHSLTTSYLDLMSHSGTSLTQSVARAMLRFVTVTAEALRFRQIQRGFRTTLDDLSGRSYVMTAEDVDLTLNWGRLSSVLPDYHGQDSVRVGRISFGSINAILGSVALILNCHHHASRVARKDEL

SEQ ID NO: 72 - protein, 524 aa, Artificial Sequence
  source: /note="Description of Artificial Sequence: Synthetic polypeptide"
  source: /note="Multivalent CD20-binding molecule component 26"
  MISC_FEATURE (511)..(511): /note="Cys residue at this position is available to form a homodimer or heterodimer via a disulfide bond with any of SEQ ID NOS 47-175"
QVQLQQPGAELVKPGASVKMSCKTSGYTFTSYNVHWVKQTPGQGLEWIGAIYPGNGDTSFNQKFKGKATLTADKSSSTVYMQLSSLTSEDSAVYYCARSNYYGSSYVWFFDVWGAGTTVTVSSGSTSGSGKPGSGEGSQIVLSQSPTILSASPGEKVTMTCRASSSVSYMDWYQQKPGSSPKPWIYATSNLASGVPARFSGSGSGTSYSLTISRVEAEDAATYYCQQWISNPPTFGAGTKLELKEFPKPSTPPGSSGGAPGILGFVFTLKEFTLDFSTAKTYVDSLNVIRSAIGTPLQTISSGGTSLLMIDSGSGDNLFAVDVRGIDPEEGRFNNLRLIVERNNLYVTGFVNRTNNVFYRFADFSHVTFPGTTAVTLSGDSSYTTLQRVAGISRTGMQINRHSLTTSYLDLMSHSGTSLTQSVARAMLRFVTVTAEALRFRQIQRGFRTTLDDLSGRSYVMTAEDVDLTLNWGRLSSVLPDYHGQDSVRVGRISFGSINAILGSVALILNCHHHASRVARKDEL

SEQ ID NO: 73 - protein, 514 aa, Artificial Sequence
  source: /note="Description of Artificial Sequence: Synthetic polypeptide"
  source: /note="Multivalent CD20-binding molecule component 27"
  MISC_FEATURE (501)..(501): /note="Cys residue at this position is available to form a homodimer or heterodimer via a disulfide bond with any of SEQ ID NOS 47-175"
QVQLQQPGAELVKPGASVKMSCKTSGYTFTSYNVHWVKQTPGQGLEWIGAIYPGNGDTSFNQKFKGKATLTADKSSSTVYMQLSSLTSEDSAVYYCARSNYYGSSYVWFFDVWGAGTTVTVSSGGGGSQIVLSQSPTILSASPGEKVTMTCRASSSVSYMDWYQQKPGSSPKPWIYATSNLASGVPARFSGSGSGTSYSLTISRVEAEDAATYYCQQWISNPPTFGAGTKLELKEFPKPSTPPGSSGGAPGILGFVFTLKEFTLDFSTAKTYVDSLNVIRSAIGTPLQTISSGGTSLLMIDSGSGDNLFAVDVRGIDPEEGRFNNLRLIVERNNLYVTGFVNRTNNVFYRFADFSHVTFPGTTAVTLSGDSSYTTLQRVAGISRTGMQINRHSLTTSYLDLMSHSGTSLTQSVARAMLRFVTVTAEALRFRQIQRGFRTTLDDLSGRSYVMTAEDVDLTLNWGRLSSVLPDYHGQDSVRVGRISFGSINAILGSVALILNCHHHASRVARKDEL

SEQ ID NO: 74 - protein, 496 aa, Artificial Sequence
  source: /note="Description of Artificial Sequence: Synthetic polypeptide"
  source: /note="Multivalent CD20-binding molecule component 28"
  MISC_FEATURE (483)..(483): /note="Cys residue at this position is available to form a homodimer or heterodimer via a disulfide bond with any of SEQ ID NOS 47-175"
QVQLQQPGAELVKPGASVKMSCKTSGYTFTSYNVHWVKQTPGQGLEWIGAIYPGNGDTSFNQKFKGKATLTADKSSSTVYMQLSSLTSEDSAVYYCARSNYYGSSYVWFFDVWGAGTTVTVSSGGGGSQIVLSQSPTILSASPGEKVTMTCRASSSVSYMDWYQQKPGSSPKPWIYATSNLASGVPARFSGSGSGTSYSLTISRVEAEDAATYYCQQWISNPPTFGAGTKLELKGGGGSGGKEFTLDFSTAKTYVDSLNVIRSAIGTPLQTISSGGTSLLMIDSGTGDNLFAVDVRGIDPEEGRFNNLRLIVERNNLYVTGFVNRTNNVFYRFADFSHVTFPGTTAVTLSGDSSYTTLQRVAGISRTGMQINRHSLTTSYLDLMSHSGTSLTQSVARAMLRFVTVTAEALRFRQIQRGFRTTLDDLSGRSYVMTAEDVDLTLNWGRLSSVLPDYHGQDSVRVGRISFGSINAILGSVALILNCHHHASRVARKDEL

SEQ ID NO: 75 - protein, 521 aa, Artificial Sequence
  source: /note="Description of Artificial Sequence: Synthetic polypeptide"
  source: /note="Multivalent CD20-binding molecule component 29"
  MISC_FEATURE (512)..(512): /note="Cys residue at this position is available to form a homodimer or heterodimer via a disulfide bond with any of SEQ ID NOS 47-175"
QVQLQQPGAELVKPGASVKMSCKTSGYTFTSYNVHWVKQTPGQGLEWIGAIYPGNGDTSFNQKFKGKATLTADKSSSTVYMQLSSLTSEDSAVYYCARSNYYGSSYVWFFDVWGAGTTVTVSSGGGGSGGGGSGGGGSGGGGSGGGGSQIVLSQSPTILSASPGEKVTMTCRASSSVSYMDWYQQKPGSSPKPWIYATSNLASGVPARFSGSGSGTSYSLTISRVEAEDAATYYCQQWISNPPTFGAGTKLELKEFPKPSTPPGSSGGAPKEFTLDFSTAKTYVDSLNVIRSAIGTPLQTISSGGTSLLMIDSGSGDNLFAVDVRGIAPEEGRFNNLRLIVERNNLYVTGFVNRTNNVFYRFADFSHVTFPGTTAVTLSADSSYTTLQRVAGISRTGMQINRHSLTTSYLDLMSHSATSLTQSVARAMLRFVTVTAEALRFRQIQRGFRTTLDDLSGASYVMTAEDVDLTLNWGRLSSVLPDYHGQDSVRVGRISFGSINAILGSVALILNCHHHASKDEL

SEQ ID NO: 76 - protein, 515 aa, Artificial Sequence
  source: /note="Description of Artificial Sequence: Synthetic polypeptide"
  source: /note="Multivalent CD20-binding molecule component 30"
  MISC_FEATURE (502)..(502): /note="Cys residue at this position is available to form a homodimer or heterodimer via a disulfide bond with any of SEQ ID NOS 47-175"
QVQLQQPGAELVKPGASVKMSCKTSGYTFTSYNVHWVKQTPGQGLEWIGAIYPGNGDTSFNQKFKGKATLTADKSSSTVYMQLSSLTSEDSAVYYCARSNYYGSSYVWFFDVWGAGTTVTVSSGSTSGSGKPGSGEGSQIVLSQSPTILSASPGEKVTMTCRASSSVSYMDWYQQKPGSSPKPWIYATSNLASGVPARFSGSGSGTSYSLTISRVEAEDAATYYCQQWISNPPTFGAGTKLELKEFPKPSTPPGSSGGAPKEFTLDFSTAKTYVDSLNVIRSAIGTPLQTISSGGTSLLMIDNLVPMVATVVDVRGIDPEEGRFNNLRLIVERNNLYVTGFVNRTNNVFYRFADFSHVTFPGTTAVTLSGDSSYTTLQRVAGISRTGMQINRHSLTTSYLDLMSHSGTSLTQSVARAMLRFVTVTAEALRFRQIQRGFRTTLDDLSGRSYVMTAEDVDLTLNWGRLSSVLPDYHGQDSVRVGRISFGSINAILGSVALILNCHHHASRVARKDEL

SEQ ID NO: 77 - protein, 530 aa, Artificial Sequence
  source: /note="Description of Artificial Sequence: Synthetic polypeptide"
  source: /note="Multivalent CD20-binding molecule component 31"
  MISC_FEATURE (521)..(521): /note="Cys residue at this position is available to form a homodimer or heterodimer via a disulfide bond with any of SEQ ID NOS 47-175"
QVQLQQPGAELVKPGASVKMSCKTSGYTFTSYNVHWVKQTPGQGLEWIGAIYPGNGDTSFNQKFKGKATLTADKSSSTVYMQLSSLTSEDSAVYYCARSNYYGSSYVWFFDVWGAGTTVTVSSGGGGSGGGGSGGGGSGGGGSGGGGSQIVLSQSPTILSASPGEKVTMTCRASSSVSYMDWYQQKPGSSPKPWIYATSNLASGVPARFSGSGSGTSYSLTISRVEAEDAATYYCQQWISNPPTFGAGTKLELKEFPKPSTPPGSSGGAPGILGFVFTLKEFTLDFSTAKTYVDSLNVIRSAIGTPLQTISSGGTSLLMIDSGSGDNLFAVDVRGIDPEEGRFNNLRLIVERNNLYVTGFVNRTNNVFYRFADFSHVTFPGTTAVTLSGDSSYTTLQRVAGISRTGMQINRHSLTTSYLDLMSHSGTSLTQSVARAMLRFVTVTAEALRFRQIQRGFRTTLDDLSGRSYVMTAEDVDLTLNWGRLSSVLPDYHGQDSVRVGRISFGSINAILGSVALILNCHHHASKDEL

SEQ ID NO: 78 - protein, 512 aa, Artificial Sequence
  source: /note="Description of Artificial Sequence: Synthetic polypeptide"
  source: /note="Multivalent CD20-binding molecule component 32"
  MISC_FEATURE (503)..(503): /note="Cys residue at this position is available to form a homodimer or heterodimer via a disulfide bond with any of SEQ ID NOS 47-175"
QVQLQQPGAELVKPGASVKMSCKASGYTFTSYNMHWVKQTPGRGLEWIGAIYPGNGDTSYNQKFKGKATLTADKSSSTAYMQLSSLTSEDSAVYYCARSTYYGGDWYFNVWGAGTTVTVSAGSTSGSGKPGSGEGSTKGQIVLSQSPAILSASPGEKVTMTCRASSSVSYIHWFQQKPGSSPKPWIYATSNLASGVPVRFSGSGSGTSYSLTISRVEAEDAATYYCQQWTSNPPTFGGGTKLEIKEFPKPSTPPGSSGGAPKEFTLDFSTAKTYVDSLNVIRSAIGTPLQTISSGGTSLLMIDSGSGDNLFAVDVRGIDPEEGRFNNLRLIVERNNLYVTGFVNRTNNVFYRFADFSHVTFPGTTAVTLSGDSSYTTLQRVAGISRTGMQINRHSLTTSYLDLMSHSGTSLTQSVARAMLRFVTVTAEALRFRQIQRGFRTTLDDLSGRSYVMTAEDVDLTLNWGRLSSVLPDYHGQDSVRVGRISFGSINAILGSVALILNCHHHASRVAR

SEQ ID NO: 79 - protein, 497 aa, Artificial Sequence
  source: /note="Description of Artificial Sequence: Synthetic polypeptide"
  source: /note="Multivalent CD20-binding molecule component 33"
  MISC_FEATURE (484)..(484): /note="Cys residue at this position is available to form a homodimer or heterodimer via a disulfide bond with any of SEQ ID NOS 47-175"
QVQLQQPGAELVKPGASVKMSCKASGYTFTSYNMHWVKQTPGRGLEWIGAIYPGNGDTSYNQKFKGKATLTADKSSSTAYMQLSSLTSEDSAVYYCARSTYYGGDWYFNVWGAGTTVTVSAGGGGSTKGQIVLSQSPAILSASPGEKVTMTCRASSSVSYIHWFQQKPGSSPKPWIYATSNLASGVPVRFSGSGSGTSYSLTISRVEAEDAATYYCQQWTSNPPTFGGGTKLEIKGGGGSGGKEFTLDFSTAKTYVDSLNVIRSAIGTPLQTISSGGTSLLMIDSGSGDNLFAVDVRGIDPEEGRFNNLRLIVERNNLYVTGFVNRTNNVFYRFADFSHVTFPGTTAVTLSGDSSYTTLQRVAGISRTGMQINRHSLTTSYLDLMSHSGTSLTQSVARAMLRFVTVTAEALRFRQIQRGFRTTLDDLSGRSYVMTAEDVDLTLNWGRLSSVLPDYHGQDSVRVGRISFGSINAILGSVALILNCHHHASRVARKDEL

SEQ ID NO: 80 - protein, 522 aa, Artificial Sequence
  source: /note="Description of Artificial Sequence: Synthetic polypeptide"
  source: /note="Multivalent CD20-binding molecule component 34"
  MISC_FEATURE (513)..(513): /note="Cys residue at this position is available to form a homodimer or heterodimer via a disulfide bond with any of SEQ ID NOS 47-175"
QVQLQQPGAELVKPGASVKMSCKASGYTFTSYNMHWVKQTPGRGLEWIGAIYPGNGDTSYNQKFKGKATLTADKSSSTAYMQLSSLTSEDSAVYYCARSTYYGGDWYFNVWGAGTTVTVSAGGGGSGGGGSGGGGSGGGGSGGGGSTKGQIVLSQSPAILSASPGEKVTMTCRASSSVSYIHWFQQKPGSSPKPWIYATSNLASGVPVRFSGSGSGTSYSLTISRVEAEDAATYYCQQWTSNPPTFGGGTKLEIKEFPKPSTPPGSSGGAPKEFTLDFSTAKTYVDSLNVIRSAIGTPLQTISSGGTSLLMIDSGTGDNLFAVDVRGIDPEEGRFNNLRLIVERNNLYVTGFVNRTNNVFYRFADFSHVTFPGTTAVTLSGDSSYTTLQRVAGISRTGMQINRHSLTTSYLDLMSHSGTSLTQSVARAMLRFVTVTAEALRFRQIQRGFRTTLDDLSGRSYVMTAEDVDLTLNWGRLSSVLPDYHGQDSVRVGRISFGSINAILGSVALILNCHHHASRVAR

SEQ ID NO: 81 - protein, 502 aa, Artificial Sequence
  source: /note="Description of Artificial Sequence: Synthetic polypeptide"
  source: /note="Multivalent CD20-binding molecule component 35"
  MISC_FEATURE (493)..(493): /note="Cys residue at this position is available to form a homodimer or heterodimer via a disulfide bond with any of SEQ ID NOS 47-175"
QVQLQQPGAELVKPGASVKMSCKASGYTFTSYNMHWVKQTPGRGLEWIGAIYPGNGDTSYNQKFKGKATLTADKSSSTAYMQLSSLTSEDSAVYYCARSTYYGGDWYFNVWGAGTTVTVSAGGGGSTKGQIVLSQSPAILSASPGEKVTMTCRASSSVSYIHWFQQKPGSSPKPWIYATSNLASGVPVRFSGSGSGTSYSLTISRVEAEDAATYYCQQWTSNPPTFGGGTKLEIKEFPKPSTPPGSSGGAPKEFTLDFSTAKTYVDSLNVIRSAIGTPLQTISSGGTSLLMIDSGSGDNLFAVDVRGIAPEEGRFNNLRLIVERNNLYVTGFVNRTNNVFYRFADFSHVTFPGTTAVTLSADSSYTTLQRVAGISRTGMQINRHSLTTSYLDLMSHSATSLTQSVARAMLRFVTVTAEALRFRQIQRGFRTTLDDLSGASYVMTAEDVDLTLNWGRLSSVLPDYHGQDSVRVGRISFGSINAILGSVALILNCHHHASRVAR

SEQ ID NO: 82 - protein, 512 aa, Artificial Sequence
  source: /note="Description of Artificial Sequence: Synthetic polypeptide"
  source: /note="Multivalent CD20-binding molecule component 36"
  MISC_FEATURE (503)..(503): /note="Cys residue at this position is available to form a homodimer or heterodimer via a disulfide bond with any of SEQ ID NOS 47-175"
QVQLQQPGAELVKPGASVKMSCKASGYTFTSYNMHWVKQTPGRGLEWIGAIYPGNGDTSYNQKFKGKATLTADKSSSTAYMQLSSLTSEDSAVYYCARSTYYGGDWYFNVWGAGTTVTVSAGSTSGSGKPGSGEGSTKGQIVLSQSPAILSASPGEKVTMTCRASSSVSYIHWFQQKPGSSPKPWIYATSNLASGVPVRFSGSGSGTSYSLTISRVEAEDAATYYCQQWTSNPPTFGGGTKLEIKEFPKPSTPPGSSGGAPKEFTLDFSTAKTYVDSLNVIRSAIGTPLQTISSGGTSLLMIDNLVPMVATVVDVRGIDPEEGRFNNLRLIVERNNLYVTGFVNRTNNVFYRFADFSHVTFPGTTAVTLSGDSSYTTLQRVAGISRTGMQINRHSLTTSYLDLMSHSGTSLTQSVARAMLRFVTVTAEALRFRQIQRGFRTTLDDLSGRSYVMTAEDVDLTLNWGRLSSVLPDYHGQDSVRVGRISFGSINAILGSVALILNCHHHASRVAR

SEQ ID NO: 83 - protein, 521 aa, Artificial Sequence
  source: /note="Description of Artificial Sequence: Synthetic polypeptide"
  source: /note="Multivalent CD20-binding molecule component 37"
  MISC_FEATURE (512)..(512): /note="Cys residue at this position is available to form a homodimer or heterodimer via a disulfide bond with any of SEQ ID NOS 47-175"
QVQLQQPGAELVKPGASVKMSCKASGYTFTSYNMHWVKQTPGRGLEWIGAIYPGNGDTSYNQKFKGKATLTADKSSSTAYMQLSSLTSEDSAVYYCARSTYYGGDWYFNVWGAGTTVTVSAGSTSGSGKPGSGEGSTKGQIVLSQSPAILSASPGEKVTMTCRASSSVSYIHWFQQKPGSSPKPWIYATSNLASGVPVRFSGSGSGTSYSLTISRVEAEDAATYYCQQWTSNPPTFGGGTKLEIKEFPKPSTPPGSSGGAPGILGFVFTLKEFTLDFSTAKTYVDSLNVIRSAIGTPLQTISSGGTSLLMIDSGSGDNLFAVDVRGIDPEEGRFNNLRLIVERNNLYVTGFVNRTNNVFYRFADFSHVTFPGTTAVTLSGDSSYTTLQRVAGISRTGMQINRHSLTTSYLDLMSHSGTSLTQSVARAMLRFVTVTAEALRFRQIQRGFRTTLDDLSGRSYVMTAEDVDLTLNWGRLSSVLPDYHGQDSVRVGRISFGSINAILGSVALILNCHHHASAVAA

SEQ ID NO: 84 - protein, 516 aa, Artificial Sequence
  source: /note="Description of Artificial Sequence: Synthetic polypeptide"
  source: /note="Multivalent CD20-binding molecule component 38"
  MISC_FEATURE (503)..(503): /note="Cys residue at this position is available to form a homodimer or heterodimer via a disulfide bond with any of SEQ ID NOS 47-175"
QVQLQQPGAELVKPGASVKMSCKASGYTFTSYNMHWVKQTPGRGLEWIGAIYPGNGDTSYNQKFKGKATLTADKSSSTAYMQLSSLTSEDSAVYYCARSTYYGGDWYFNVWGAGTTVTVSAGSTSGSGKPGSGEGSTKGQIVLSQSPAILSASPGEKVTMTCRASSSVSYIHWFQQKPGSSPKPWIYATSNLASGVPVRFSGSGSGTSYSLTISRVEAEDAATYYCQQWTSNPPTFGGGTKLEIKEFPKPSTPPGSSGGAPKEFTLDFSTAKTYVDSLNVIRSAIGTPLQTISSGGTSLLMIDSGSGDNLFAVDVRGIDPEEGRFNNLRLIVERNNLYVTGFVNRTNNVFYRFADFSHVTFPGTTAVTLSGDSSYTTLQRVAGISRTGMQINRHSLTTSYLDLMSHSGTSLTQSVARAMLRFVTVTAEALRFRQIQRGFRTTLDDLSGRSYVMTAEDVDLTLNWGRLSSVLPDYHGQDSVRVGRISFGSINAILGSVALILNCHHHASRVARKDEL

SEQ ID NO: 85 - protein, 513 aa, Artificial Sequence
  source: /note="Description of Artificial Sequence: Synthetic polypeptide"
  source: /note="Multivalent CD20-binding molecule component 39"
  MISC_FEATURE (504)..(504): /note="Cys residue at this position is available to form a homodimer or heterodimer via a disulfide bond with any of SEQ ID NOS 47-175"
QVQLQQPGAELVKPGASVKMSCKASGYTFTSYNMHWVKQTPGRGLEWIGAIYPGNGDTSYNQKFKGKATLTADKSSSTAYMQLSSLTSEDSAVYYCARSTYYGGDWYFNVWGAGTTVTVSAGGGGSGGGGSGGGGSGGGGSGGGGSTKGQIVLSQSPAILSASPGEKVTMTCRASSSVSYIHWFQQKPGSSPKPWIYATSNLASGVPVRFSGSGSGTSYSLTISRVEAEDAATYYCQQWTSNPPTFGGGTKLEIKGGGGSGGKEFTLDFSTAKTYVDSLNVIRSAIGTPLQTISSGGTSLLMIDSGSGDNLFAVDVRGIDPEEGRFNNLRLIVERNNLYVTGFVNRTNNVFYRFADFSHVTFPGTTAVTLSGDSSYTTLQRVAGISRTGMQINRHSLTTSYLDLMSHSGTSLTQSVARAMLRFVTVTAEALRFRQIQRGFRTTLDDLSGRSYVMTAEDVDLTLNWGRLSSVLPDYHGQDSVRVGRISFGSINAILGSVALILNCHHHASRVAR

SEQ ID NO: 86 - protein, 493 aa, Artificial Sequence
  source: /note="Description of Artificial Sequence: Synthetic polypeptide"
  source: /note="Multivalent CD20-binding molecule component 40"
  MISC_FEATURE (484)..(484): /note="Cys residue at this position is available to form a homodimer or heterodimer via a disulfide bond with any of SEQ ID NOS 47-175"
QVQLQQPGAELVKPGASVKMSCKASGYTFTSYNMHWVKQTPGRGLEWIGAIYPGNGDTSYNQKFKGKATLTADKSSSTAYMQLSSLTSEDSAVYYCARSTYYGGDWYFNVWGAGTTVTVSAGGGGSTKGQIVLSQSPAILSASPGEKVTMTCRASSSVSYIHWFQQKPGSSPKPWIYATSNLASGVPVRFSGSGSGTSYSLTISRVEAEDAATYYCQQWTSNPPTFGGGTKLEIKGGGGSGGKEFTLDFSTAKTYVDSLNVIRSAIGTPLQTISSGGTSLLMIDSGTGDNLFAVDVRGIDPEEGRFNNLRLIVERNNLYVTGFVNRTNNVFYRFADFSHVTFPGTTAVTLSGDSSYTTLQRVAGISRTGMQINRHSLTTSYLDLMSHSGTSLTQSVARAMLRFVTVTAEALRFRQIQRGFRTTLDDLSGRSYVMTAEDVDLTLNWGRLSSVLPDYHGQDSVRVGRISFGSINAILGSVALILNCHHHASRVAR

SEQ ID NO: 87 - protein, 508 aa, Artificial Sequence
  source: /note="Description of Artificial Sequence: Synthetic polypeptide"
  source: /note="Multivalent CD20-binding molecule component 41"
  MISC_FEATURE (503)..(503): /note="Cys residue at this position is available to form a homodimer or heterodimer via a disulfide bond with any of SEQ ID NOS 47-175"
QVQLQQPGAELVKPGASVKMSCKASGYTFTSYNMHWVKQTPGRGLEWIGAIYPGNGDTSYNQKFKGKATLTADKSSSTAYMQLSSLTSEDSAVYYCARSTYYGGDWYFNVWGAGTTVTVSAGSTSGSGKPGSGEGSTKGQIVLSQSPAILSASPGEKVTMTCRASSSVSYIHWFQQKPGSSPKPWIYATSNLASGVPVRFSGSGSGTSYSLTISRVEAEDAATYYCQQWTSNPPTFGGGTKLEIKEFPKPSTPPGSSGGAPKEFTLDFSTAKTYVDSLNVIRSAIGTPLQTISSGGTSLLMIDSGSGDNLFAVDVRGIAPEEGRFNNLRLIVERNNLYVTGFVNRTNNVFYRFADFSHVTFPGTTAVTLSADSSYTTLQRVAGISRTGMQINRHSLTTSYLDLMSHSATSLTQSVARAMLRFVTVTAEALRFRQIQRGFRTTLDDLSGASYVMTAEDVDLTLNWGRLSSVLPDYHGQDSVRVGRISFGSINAILGSVALILNCHHHAS

SEQ ID NO: 88 - protein, 512 aa, Artificial Sequence; identical to SEQ ID NO: 82
  source: /note="Description of Artificial Sequence: Synthetic polypeptide"
  source: /note="Multivalent CD20-binding molecule component 42"
  MISC_FEATURE (503)..(503): /note="Cys residue at this position is available to form a homodimer or heterodimer via a disulfide bond with any of SEQ ID NOS 47-175"

SEQ ID NO: 89 - protein, 521 aa, Artificial Sequence
  source: /note="Description of Artificial Sequence: Synthetic polypeptide"
  source: /note="Multivalent CD20-binding molecule component 43"
  MISC_FEATURE (512)..(512): /note="Cys residue at this position is available to form a homodimer or heterodimer via a disulfide bond with any of SEQ ID NOS 47-175"
QVQLQQPGAELVKPGASVKMSCKASGYTFTSYNMHWVKQTPGRGLEWIGAIYPGNGDTSYNQKFKGKATLTADKSSSTAYMQLSSLTSEDSAVYYCARSTYYGGDWYFNVWGAGTTVTVSAGSTSGSGKPGSGEGSTKGQIVLSQSPAILSASPGEKVTMTCRASSSVSYIHWFQQKPGSSPKPWIYATSNLASGVPVRFSGSGSGTSYSLTISRVEAEDAATYYCQQWTSNPPTFGGGTKLEIKEFPKPSTPPGSSGGAPGILGFVFTLKEFTLDFSTAKTYVDSLNVIRSAIGTPLQTISSGGTSLLMIDSGSGDNLFAVDVRGIDPEEGRFNNLRLIVERNNLYVTGFVNRTNNVFYRFADFSHVTFPGTTAVTLSGDSSYTTLQRVAGISRTGMQINRHSLTTSYLDLMSHSGTSLTQSVARAMLRFVTVTAEALRFRQIQRGFRTTLDDLSGRSYVMTAEDVDLTLNWGRLSSVLPDYHGQDSVRVGRISFGSINAILGSVALILNCHHHASKDEL

SEQ ID NO: 90 - protein, 511 aa, Artificial Sequence
  source: /note="Description of Artificial Sequence: Synthetic polypeptide"
  source: /note="Multivalent CD20-binding molecule component 44"
  MISC_FEATURE (502)..(502): /note="Cys residue at this position is available to form a homodimer or heterodimer via a disulfide bond with any of SEQ ID NOS 47-175"
EIVLTQSPATLSLSPGERATLSCRASQSVSSYLAWYQQKPGQAPRLLIYDASNRATGIPARFSGSGSGTDFTLTISSLEPEDFAVYYCQQRSNWPITFGQGTRLEIKGSTSGSGKPGSGEGSEVQLVESGGGLVQPGRSLRLSCAASGFTFNDYAMHWVRQAPGKGLEWVSTISWNSGSIGYADSVKGRFTISRDNAKKSLYLQMNSLRAEDTALYYCAKDIQYGNYYYGMDVWGQGTTVTVSSEFPKPSTPPGSSGGAPKEFTLDFSTAKTYVDSLNVIRSAIGTPLQTISSGGTSLLMIDSGSGDNLFAVDVRGIDPEEGRFNNLRLIVERNNLYVTGFVNRTNNVFYRFADFSHVTFPGTTAVTLSGDSSYTTLQRVAGISRTGMQINRHSLTTSYLDLMSHSGTSLTQSVARAMLRFVTVTAEALRFRQIQRGFRTTLDDLSGRSYVMTAEDVDLTLNWGRLSSVLPDYHGQDSVRVGRISFGSINAILGSVALILNCHHHASRVAR

SEQ ID NO: 91 - protein, 501 aa, Artificial Sequence
  source: /note="Description of Artificial Sequence: Synthetic polypeptide"
  source: /note="Multivalent CD20-binding molecule component 45"
  MISC_FEATURE (492)..(492): /note="Cys residue at this position is available to form a homodimer or heterodimer via a disulfide bond with any of SEQ ID NOS 47-175"
EIVLTQSPATLSLSPGERATLSCRASQSVSSYLAWYQQKPGQAPRLLIYDASNRATGIPARFSGSGSGTDFTLTISSLEPEDFAVYYCQQRSNWPITFGQGTRLEIKGGGGSEVQLVESGGGLVQPGRSLRLSCAASGFTFNDYAMHWVRQAPGKGLEWVSTISWNSGSIGYADSVKGRFTISRDNAKKSLYLQMNSLRAEDTALYYCAKDIQYGNYYYGMDVWGQGTTVTVSSEFPKPSTPPGSSGGAPKEFTLDFSTAKTYVDSLNVIRSAIGTPLQTISSGGTSLLMIDSGSGDNLFAVDVRGIDPEEGRFNNLRLIVERNNLYVTGFVNRTNNVFYRFADFSHVTFPGTTAVTLSGDSSYTTLQRVAGISRTGMQINRHSLTTSYLDLMSHSGTSLTQSVARAMLRFVTVTAEALRFRQIQRGFRTTLDDLSGRSYVMTAEDVDLTLNWGRLSSVLPDYHGQDSVRVGRISFGSINAILGSVALILNCHHHASRVAR

SEQ ID NO: 92 - protein, 511 aa, Artificial Sequence
  source: /note="Description of Artificial Sequence: Synthetic polypeptide"
  source: /note="Multivalent CD20-binding molecule component 46"
  MISC_FEATURE (502)..(502): /note="Cys residue at this position is available to form a homodimer or heterodimer via a disulfide bond with any of SEQ ID NOS 47-175"
EIVLTQSPATLSLSPGERATLSCRASQSVSSYLAWYQQKPGQAPRLLIYDASNRATGIPARFSGSGSGTDFTLTISSLEPEDFAVYYCQQRSNWPITFGQGTRLEIKGSTSGSGKPGSGEGSEVQLVESGGGLVQPGRSLRLSCAASGFTFNDYAMHWVRQAPGKGLEWVSTISWNSGSIGYADSVKGRFTISRDNAKKSLYLQMNSLRAEDTALYYCAKDIQYGNYYYGMDVWGQGTTVTVSSEFPKPSTPPGSSGGAPKEFTLDFSTAKTYVDSLNVIRSAIGTPLQTISSGGTSLLMIDSGTGDNLFAVDVRGIDPEEGRFNNLRLIVERNNLYVTGFVNRTNNVFYRFADFSHVTFPGTTAVTLSGDSSYTTLQRVAGISRTGMQINRHSLTTSYLDLMSHSGTSLTQSVARAMLRFVTVTAEALRFRQIQRGFRTTLDDLSGRSYVMTAEDVDLTLNWGRLSSVLPDYHGQDSVRVGRISFGSINAILGSVALILNCHHHASRVAR

SEQ ID NO: 93 - protein, 511 aa, Artificial Sequence
  source: /note="Description of Artificial Sequence: Synthetic polypeptide"
  source: /note="Multivalent CD20-binding molecule component 47"
  MISC_FEATURE (502)..(502): /note="Cys residue at this position is available to form a homodimer or heterodimer via a disulfide bond with any of SEQ ID NOS 47-175"
EIVLTQSPATLSLSPGERATLSCRASQSVSSYLAWYQQKPGQAPRLLIYDASNRATGIPARFSGSGSGTDFTLTISSLEPEDFAVYYCQQRSNWPITFGQGTRLEIKGSTSGSGKPGSGEGSEVQLVESGGGLVQPGRSLRLSCAASGFTFNDYAMHWVRQAPGKGLEWVSTISWNSGSIGYADSVKGRFTISRDNAKKSLYLQMNSLRAEDTALYYCAKDIQYGNYYYGMDVWGQGTTVTVSSEFPKPSTPPGSSGGAPKEFTLDFSTAKTYVDSLNVIRSAIGTPLQTISSGGTSLLMIDSGSGDNLFAVDVRGIAPEEGRFNNLRLIVERNNLYVTGFVNRTNNVFYRFADFSHVTFPGTTAVTLSADSSYTTLQRVAGISRTGMQINRHSLTTSYLDLMSHSATSLTQSVARAMLRFVTVTAEALRFRQIQRGFRTTLDDLSGASYVMTAEDVDLTLNWGRLSSVLPDYHGQDSVRVGRISFGSINAILGSVALILNCHHHASRVAR

SEQ ID NO: 94 - protein, 512 aa, Artificial Sequence
  source: /note="Description of Artificial Sequence: Synthetic polypeptide"
  source: /note="Multivalent CD20-binding molecule component 48"
  MISC_FEATURE (503)..(503): /note="Cys residue at this position is available to form a homodimer or heterodimer via a disulfide bond with any of SEQ ID NOS 47-175"
EIVLTQSPATLSLSPGERATLSCRASQSVSSYLAWYQQKPGQAPRLLIYDASNRATGIPARFSGSGSGTDFTLTISSLEPEDFAVYYCQQRSNWPITFGQGTRLEIKGGGGSGGGGSGGGGSGGGGSGGGGSEVQLVESGGGLVQPGRSLRLSCAASGFTFNDYAMHWVRQAPGKGLEWVSTISWNSGSIGYADSVKGRFTISRDNAKKSLYLQMNSLRAEDTALYYCAKDIQYGNYYYGMDVWGQGTTVTVSSGGGGSGGKEFTLDFSTAKTYVDSLNVIRSAIGTPLQTISSGGTSLLMIDNLVPMVATVVDVRGIDPEEGRFNNLRLIVERNNLYVTGFVNRTNNVFYRFADFSHVTFPGTTAVTLSGDSSYTTLQRVAGISRTGMQINRHSLTTSYLDLMSHSGTSLTQSVARAMLRFVTVTAEALRFRQIQRGFRTTLDDLSGRSYVMTAEDVDLTLNWGRLSSVLPDYHGQDSVRVGRISFGSINAILGSVALILNCHHHASRVAR

SEQ ID NO: 95 - protein, 521 aa, Artificial Sequence
  source: /note="Description of Artificial Sequence: Synthetic polypeptide"
  source: /note="Multivalent CD20-binding molecule component 49"
  MISC_FEATURE (512)..(512): /note="Cys residue at this position is available to form a homodimer or heterodimer via a disulfide bond with any of SEQ ID NOS 47-175"
EIVLTQSPATLSLSPGERATLSCRASQSVSSYLAWYQQKPGQAPRLLIYDASNRATGIPARFSGSGSGTDFTLTISSLEPEDFAVYYCQQRSNWPITFGQGTRLEIKGGGGSGGGGSGGGGSGGGGSGGGGSEVQLVESGGGLVQPGRSLRLSCAASGFTFNDYAMHWVRQAPGKGLEWVSTISWNSGSIGYADSVKGRFTISRDNAKKSLYLQMNSLRAEDTALYYCAKDIQYGNYYYGMDVWGQGTTVTVSSEFPKPSTPPGSSGGAPKEFTLDFSTAKTYVDSLNVIRSAIGTPLQTISSGGTSLLMIDSGSGDNLFAVDVRGIDPEEGRFNNLRLIVERNNLYVTGFVNRTNNVFYRFADFSHVTFPGTTAVTLSGDSSYTTLQRVAGISRTGMQINRHSLTTSYLDLMSHSGTSLTQSVARAMLRFVTVTAEALRFRQIQRGFRTTLDDLSGRSYVMTAEDVDLTLNWGRLSSVLPDYHGQDSVRVGRISFGSINAILGSVALILNCHHHASAVAA

SEQ ID NO: 96 - protein, 514 aa, Artificial Sequence
  source: /note="Description of Artificial Sequence: Synthetic polypeptide"
  source: /note="Multivalent CD20-binding molecule component 50"
  MISC_FEATURE (501)..(501): /note="Cys residue at this position is available to form a homodimer or heterodimer via a disulfide bond with any of SEQ ID NOS 47-175"
QIVLSQSPAILSASPGEKVTMTCRASSSVSYMHWYQQKPGSSPKPWIYAPSNLASGVPARFSGSGSGTSYSLTISRVEAEDAATYYCQQWSFNPPTFGAGTKLELKSGSTSGSGKPGSGEGSQAYLQQSGAELVRPGASVKMSCKASGYTFTSYNMHWVKQTPRQGLEWIGAIYPGNGDTSYNQKFKGKATLTVDKSSSTAYMQLSSLTSEDSAVYFCARVVYYSNSYWYFDVWGTGTTVTVSEFPKPSTPPGSSGGAPKEFTLDFSTAKTYVDSLNVIRSAIGTPLQTISSGGTSLLMIDSGSGDNLFAVDVRGIDPEEGRFNNLRLIVERNNLYVTGFVNRTNNVFYRFADFSHVTFPGTTAVTLSGDSSYTTLQRVAGISRTGMQINRHSLTTSYLDLMSHSGTSLTQSVARAMLRFVTVTAEALRFRQIQRGFRTTLDDLSGRSYVMTAEDVDLTLNWGRLSSVLPDYHGQDSVRVGRISFGSINAILGSVALILNCHHHASRVARKDEL

SEQ ID NO: 97 - protein, 511 aa, Artificial Sequence
  source: /note="Description of Artificial Sequence: Synthetic polypeptide"
  source: /note="Multivalent CD20-binding molecule component 51"
  MISC_FEATURE (502)..(502): /note="Cys residue at this position is available to form a homodimer or heterodimer via a disulfide bond with any of SEQ ID NOS 47-175"
QIVLSQSPAILSASPGEKVTMTCRASSSVSYMHWYQQKPGSSPKPWIYAPSNLASGVPARFSGSGSGTSYSLTISRVEAEDAATYYCQQWSFNPPTFGAGTKLELKSGGGGSGGGGSGGGGSGGGGSGGGGSQAYLQQSGAELVRPGASVKMSCKASGYTFTSYNMHWVKQTPRQGLEWIGAIYPGNGDTSYNQKFKGKATLTVDKSSSTAYMQLSSLTSEDSAVYFCARVVYYSNSYWYFDVWGTGTTVTVSGGGGSGGKEFTLDFSTAKTYVDSLNVIRSAIGTPLQTISSGGTSLLMIDSGSGDNLFAVDVRGIDPEEGRFNNLRLIVERNNLYVTGFVNRTNNVFYRFADFSHVTFPGTTAVTLSGDSSYTTLQRVAGISRTGMQINRHSLTTSYLDLMSHSGTSLTQSVARAMLRFVTVTAEALRFRQIQRGFRTTLDDLSGRSYVMTAEDVDLTLNWGRLSSVLPDYHGQDSVRVGRISFGSINAILGSVALILNCHHHASRVAR

SEQ ID NO: 98 - protein, 511 aa, Artificial Sequence
  source: /note="Description of Artificial Sequence: Synthetic polypeptide"
  source: /note="Multivalent CD20-binding molecule component 52"
  MISC_FEATURE (502)..(502): /note="Cys residue at this position is available to form a homodimer or heterodimer via a disulfide bond with any of SEQ ID NOS 47-175"
QIVLSQSPAILSASPGEKVTMTCRASSSVSYMHWYQQKPGSSPKPWIYAPSNLASGVPARFSGSGSGTSYSLTISRVEAEDAATYYCQQWSFNPPTFGAGTKLELKSGGGGSGGGGSGGGGSGGGGSGGGGSQAYLQQSGAELVRPGASVKMSCKASGYTFTSYNMHWVKQTPRQGLEWIGAIYPGNGDTSYNQKFKGKATLTVDKSSSTAYMQLSSLTSEDSAVYFCARVVYYSNSYWYFDVWGTGTTVTVSGGGGSGGKEFTLDFSTAKTYVDSLNVIRSAIGTPLQTISSGGTSLLMIDSGTGDNLFAVDVRGIDPEEGRFNNLRLIVERNNLYVTGFVNRTNNVFYRFADFSHVTFPGTTAVTLSGDSSYTTLQRVAGISRTGMQINRHSLTTSYLDLMSHSGTSLTQSVARAMLRFVTVTAEALRFRQIQRGFRTTLDDLSGRSYVMTAEDVDLTLNWGRLSSVLPDYHGQDSVRVGRISFGSINAILGSVALILNCHHHASRVAR

SEQ ID NO: 99 - protein, 497 aa, Artificial Sequence
  source: /note="Description of Artificial Sequence: Synthetic polypeptide"
  source: /note="Multivalent CD20-binding molecule component 53"
  MISC_FEATURE (492)..(492): /note="Cys residue at this position is available to form a homodimer or heterodimer via a disulfide bond with any of SEQ ID NOS 47-175"
QIVLSQSPAILSASPGEKVTMTCRASSSVSYMHWYQQKPGSSPKPWIYAPSNLASGVPARFSGSGSGTSYSLTISRVEAEDAATYYCQQWSFNPPTFGAGTKLELKSGSTSGSGKPGSGEGSQAYLQQSGAELVRPGASVKMSCKASGYTFTSYNMHWVKQTPRQGLEWIGAIYPGNGDTSYNQKFKGKATLTVDKSSSTAYMQLSSLTSEDSAVYFCARVVYYSNSYWYFDVWGTGTTVTVSGGGGSGGKEFTLDFSTAKTYVDSLNVIRSAIGTPLQTISSGGTSLLMIDSGSGDNLFAVDVRGIAPEEGRFNNLRLIVERNNLYVTGFVNRTNNVFYRFADFSHVTFPGTTAVTLSADSSYTTLQRVAGISRTGMQINRHSLTTSYLDLMSHSATSLTQSVARAMLRFVTVTAEALRFRQIQRGFRTTLDDLSGASYVMTAEDVDLTLNWGRLSSVLPDYHGQDSVRVGRISFGSINAILGSVALILNCHHHAS

SEQ ID NO: 100 - protein, 491 aa, Artificial Sequence
  source: /note="Description of Artificial Sequence: Synthetic polypeptide"
  source: /note="Multivalent CD20-binding molecule component 54"
  MISC_FEATURE (482)..(482): /note="Cys residue at this position is available to form a homodimer or heterodimer via a disulfide bond with any of SEQ ID NOS 47-175"
QIVLSQSPAILSASPGEKVTMTCRASSSVSYMHWYQQKPGSSPKPWIYAPSNLASGVPARFSGSGSGTSYSLTISRVEAEDAATYYCQQWSFNPPTFGAGTKLELKSGGGGSQAYLQQSGAELVRPGASVKMSCKASGYTFTSYNMHWVKQTPRQGLEWIGAIYPGNGDTSYNQKFKGKATLTVDKSSSTAYMQLSSLTSEDSAVYFCARVVYYSNSYWYFDVWGTGTTVTVSGGGGSGGKEFTLDFSTAKTYVDSLNVIRSAIGTPLQTISSGGTSLLMIDNLVPMVATVVDVRGIDPEEGRFNNLRLIVERNNLYVTGFVNRTNNVFYRFADFSHVTFPGTTAVTLSGDSSYTTLQRVAGISRTGMQINRHSLTTSYLDLMSHSGTSLTQSVARAMLRFVTVTAEALRFRQIQRGFRTTLDDLSGRSYVMTAEDVDLTLNWGRLSSVLPDYHGQDSVRVGRISFGSINAILGSVALILNCHHHASRVAR

SEQ ID NO: 101 - protein, 506 aa, Artificial Sequence
  source: /note="Description of Artificial Sequence: Synthetic polypeptide"
  source: /note="Multivalent CD20-binding molecule component 55"
  MISC_FEATURE (501)..(501): /note="Cys residue at this position is available to form a homodimer or heterodimer via a disulfide bond with any of SEQ ID NOS 47-175"
QIVLSQSPAILSASPGEKVTMTCRASSSVSYMHWYQQKPGSSPKPWIYAPSNLASGVPARFSGSGSGTSYSLTISRVEAEDAATYYCQQWSFNPPTFGAGTKLELKSGSTSGSGKPGSGEGSQAYLQQSGAELVRPGASVKMSCKASGYTFTSYNMHWVKQTPRQGLEWIGAIYPGNGDTSYNQKFKGKATLTVDKSSSTAYMQLSSLTSEDSAVYFCARVVYYSNSYWYFDVWGTGTTVTVSEFPKPSTPPGSSGGAPKEFTLDFSTAKTYVDSLNVIRSAIGTPLQTISSGGTSLLMIDSGSGDNLFAVDVRGIDPEEGRFNNLRLIVERNNLYVTGFVNRTNNVFYRFADFSHVTFPGTTAVTLSGDSSYTTLQRVAGISRTGMQINRHSLTTSYLDLMSHSGTSLTQSVARAMLRFVTVTAEALRFRQIQRGFRTTLDDLSGRSYVMTAEDVDLTLNWGRLSSVLPDYHGQDSVRVGRISFGSINAILGSVALILNCHHHAS

SEQ ID NO: 102 - protein, 510 aa, Artificial Sequence
  source: /note="Description of Artificial Sequence: Synthetic polypeptide"
  source: /note="Multivalent CD20-binding molecule component 56"
  MISC_FEATURE (501)..(501): /note="Cys residue at this position is available to form a homodimer or heterodimer via a disulfide bond with any of SEQ ID NOS 47-175"
QAYLQQSGAELVRPGASVKMSCKASGYTFTSYNMHWVKQTPRQGLEWIGAIYPGNGDTSYNQKFKGKATLTVDKSSSTAYMQLSSLTSEDSAVYFCARVVYYSNSYWYFDVWGTGTTVTVSGSTSGSGKPGSGEGSQIVLSQSPAILSASPGEKVTMTCRASSSVSYMHWYQQKPGSSPKPWIYAPSNLASGVPARFSGSGSGTSYSLTISRVEAEDAATYYCQQWSFNPPTFGAGTKLELKSEFPKPSTPPGSSGGAPKEFTLDFSTAKTYVDSLNVIRSAIGTPLQTISSGGTSLLMIDSGSGDNLFAVDVRGIDPEEGRFNNLRLIVERNNLYVTGFVNRTNNVFYRFADFSHVTFPGTTAVTLSGDSSYTTLQRVAGISRTGMQINRHSLTTSYLDLMSHSGTSLTQSVARAMLRFVTVTAEALRFRQIQRGFRTTLDDLSGRSYVMTAEDVDLTLNWGRLSSVLPDYHGQDSVRVGRISFGSINAILGSVALILNCHHHASRVAR

SEQ ID NO: 103 - protein, 501 aa, Artificial Sequence
  source: /note="Description of Artificial Sequence: Synthetic polypeptide"
  source: /note="Multivalent CD20-binding molecule component 57"
  MISC_FEATURE (492)..(492): /note="Cys residue at this position is available to form a homodimer or heterodimer via a disulfide bond with any of SEQ ID NOS 47-175"
QAYLQQSGAELVRPGASVKMSCKASGYTFTSYNMHWVKQTPRQGLEWIGAIYPGNGDTSYNQKFKGKATLTVDKSSSTAYMQLSSLTSEDSAVYFCARVVYYSNSYWYFDVWGTGTTVTVSGSTSGSGKPGSGEGSQIVLSQSPAILSASPGEKVTMTCRASSSVSYMHWYQQKPGSSPKPWIYAPSNLASGVPARFSGSGSGTSYSLTISRVEAEDAATYYCQQWSFNPPTFGAGTKLELKSGGGGSGGKEFTLDFSTAKTYVDSLNVIRSAIGTPLQTISSGGTSLLMIDSGSGDNLFAVDVRGIDPEEGRFNNLRLIVERNNLYVTGFVNRTNNVFYRFADFSHVTFPGTTAVTLSGDSSYTTLQRVAGISRTGMQINRHSLTTSYLDLMSHSGTSLTQSVARAMLRFVTVTAEALRFRQIQRGFRTTLDDLSGRSYVMTAEDVDLTLNWGRLSSVLPDYHGQDSVRVGRISFGSINAILGSVALILNCHHHASRVAR

SEQ ID NO: 104 - protein, 501 aa, Artificial Sequence
  source: /note="Description of Artificial Sequence: Synthetic polypeptide"
  source: /note="Multivalent CD20-binding molecule component 58"
  MISC_FEATURE (492)..(492): /note="Cys residue at this position is available to form a homodimer or heterodimer via a disulfide bond with any of SEQ ID NOS 47-175"
QAYLQQSGAELVRPGASVKMSCKASGYTFTSYNMHWVKQTPRQGLEWIGAIYPGNGDTSYNQKFKGKATLTVDKSSSTAYMQLSSLTSEDSAVYFCARVVYYSNSYWYFDVWGTGTTVTVSGSTSGSGKPGSGEGSQIVLSQSPAILSASPGEKVTMTCRASSSVSYMHWYQQKPGSSPKPWIYAPSNLASGVPARFSGSGSGTSYSLTISRVEAEDAATYYCQQWSFNPPTFGAGTKLELKSGGGGSGGKEFTLDFSTAKTYVDSLNVIRSAIGTPLQTISSGGTSLLMIDSGTGDNLFAVDVRGIDPEEGRFNNLRLIVERNNLYVTGFVNRTNNVFYRFADFSHVTFPGTTAVTLSGDSSYTTLQRVAGISRTGMQINRHSLTTSYLDLMSHSGTSLTQSVARAMLRFVTVTAEALRFRQIQRGFRTTLDDLSGRSYVMTAEDVDLTLNWGRLSSVLPDYHGQDSVRVGRISFGSINAILGSVALILNCHHHASRVAR

SEQ ID NO: 105 - protein, 491 aa, Artificial Sequence
  source: /note="Description of Artificial Sequence: Synthetic polypeptide"
  source: /note="Multivalent CD20-binding molecule component 59"
  MISC_FEATURE (482)..(482): /note="Cys residue at this position is available to form a homodimer or heterodimer via a disulfide bond with any of SEQ ID NOS 47-175"
QAYLQQSGAELVRPGASVKMSCKASGYTFTSYNMHWVKQTPRQGLEWIGAIYPGNGDTSYNQKFKGKATLTVDKSSSTAYMQLSSLTSEDSAVYFCARVVYYSNSYWYFDVWGTGTTVTVSGGGGSQIVLSQSPAILSASPGEKVTMTCRASSSVSYMHWYQQKPGSSPKPWIYAPSNLASGVPARFSGSGSGTSYSLTISRVEAEDAATYYCQQWSFNPPTFGAGTKLELKSGGGGSGGKEFTLDFSTAKTYVDSLNVIRSAIGTPLQTISSGGTSLLMIDSGSGDNLFAVDVRGIAPEEGRFNNLRLIVERNNLYVTGFVNRTNNVFYRFADFSHVTFPGTTAVTLSADSSYTTLQRVAGISRTGMQINRHSLTTSYLDLMSHSATSLTQSVARAMLRFVTVTAEALRFRQIQRGFRTTLDDLSGASYVMTAEDVDLTLNWGRLSSVLPDYHGQDSVRVGRISFGSINAILGSVALILNCHHHASRVAR

SEQ ID NO: 106 - protein, 524 aa, Artificial Sequence
  source: /note="Description of Artificial Sequence: Synthetic polypeptide"
  source: /note="Multivalent CD20-binding molecule component 60"
  MISC_FEATURE (511)..(511): /note="Cys residue at this position is available to form a homodimer or heterodimer via a disulfide bond with any of SEQ ID NOS 47-175"
QAYLQQSGAELVRPGASVKMSCKASGYTFTSYNMHWVKQTPRQGLEWIGAIYPGNGDTSYNQKFKGKATLTVDKSSSTAYMQLSSLTSEDSAVYFCARVVYYSNSYWYFDVWGTGTTVTVSGGGGSGGGGSGGGGSGGGGSGGGGSQIVLSQSPAILSASPGEKVTMTCRASSSVSYMHWYQQKPGSSPKPWIYAPSNLASGVPARFSGSGSGTSYSLTISRVEAEDAATYYCQQWSFNPPTFGAGTKLELKSEFPKPSTPPGSSGGAPKEFTLDFSTAKTYVDSLNVIRSAIGTPLQTISSGGTSLLMIDNLVPMVATVVDVRGIDPEEGRFNNLRLIVERNNLYVTGFVNRTNNVFYRFADFSHVTFPGTTAVTLSGDSSYTTLQRVAGISRTGMQINRHSLTTSYLDLMSHSGTSLTQSVARAMLRFVTVTAEALRFRQIQRGFRTTLDDLSGRSYVMTAEDVDLTLNWGRLSSVLPDYHGQDSVRVGRISFGSINAILGSVALILNCHHHASRVARKDEL

SEQ ID NO: 107 - protein, 491 aa, Artificial Sequence
  source: /note="Description of Artificial Sequence: Synthetic polypeptide"
  source: /note="Multivalent CD20-binding molecule component 61"
  MISC_FEATURE (482)..(482): /note="Cys residue at this position is available to form a homodimer or heterodimer via a disulfide bond with any of SEQ ID NOS 47-175"
QAYLQQSGAELVRPGASVKMSCKASGYTFTSYNMHWVKQTPRQGLEWIGAIYPGNGDTSYNQKFKGKATLTVDKSSSTAYMQLSSLTSEDSAVYFCARVVYYSNSYWYFDVWGTGTTVTVSGGGGSQIVLSQSPAILSASPGEKVTMTCRASSSVSYMHWYQQKPGSSPKPWIYAPSNLASGVPARFSGSGSGTSYSLTISRVEAEDAATYYCQQWSFNPPTFGAGTKLELKSGGGGSGGKEFTLDFSTAKTYVDSLNVIRSAIGTPLQTISSGGTSLLMIDSGSGDNLFAVDVRGIDPEEGRFNNLRLIVERNNLYVTGFVNRTNNVFYRFADFSHVTFPGTTAVTLSGDSSYTTLQRVAGISRTGMQINRHSLTTSYLDLMSHSGTSLTQSVARAMLRFVTVTAEALRFRQIQRGFRTTLDDLSGRSYVMTAEDVDLTLNWGRLSSVLPDYHGQDSVRVGRISFGSINAILGSVALILNCHHHASAVAA

SEQ ID NO: 108 - protein, 513 aa, Artificial Sequence
  source: /note="Description of Artificial Sequence: Synthetic polypeptide"
  source: /note="Multivalent CD20-binding molecule component 62"
  MISC_FEATURE (504)..(504): /note="Cys residue at this position is available to form a homodimer or heterodimer via a disulfide bond with any of SEQ ID NOS 47-175"
QVQLVQSGAEVKKPGSSVKVSCKASGYAFSYSWINWVRQAPGQGLEWMGRIFPGDGDTDYNGKFKGRVTITADKSTSTAYMELSSLRSEDTAVYYCARNVFDGYWLVYWGQGTLVTVSSGSTSGSGKPGSGEGSDIVMTQTPLSLPVTPGEPASISCRSSKSLLHSNGITYLYWYLQKPGQSPQLLIYQMSNLVSGVPDRFSGSGSGTDFTLKISRVEAEDVGVYYCAQNLELPYTFGGGTKVEIKEFPKPSTPPGSSGGAPKEFTLDFSTAKTYVDSLNVIRSAIGTPLQTISSGGTSLLMIDSGSGDNLFAVDVRGIDPEEGRFNNLRLIVERNNLYVTGFVNRTNNVFYRFADFSHVTFPGTTAVTLSGDSSYTTLQRVAGISRTGMQINRHSLTTSYLDLMSHSGTSLTQSVARAMLRFVTVTAEALRFRQIQRGFRTTLDDLSGRSYVMTAEDVDLTLNWGRLSSVLPDYHGQDSVRVGRISFGSINAILGSVALILNCHHHASRVAR

SEQ ID NO: 109 - protein, 522 aa, Artificial Sequence
  source: /note="Description of Artificial Sequence: Synthetic polypeptide"
  source: /note="Multivalent CD20-binding molecule component 63"
  MISC_FEATURE (513)..(513): /note="Cys residue at this position is available to form a homodimer or heterodimer via a disulfide bond with any of SEQ ID NOS 47-175"
QVQLVQSGAEVKKPGSSVKVSCKASGYAFSYSWINWVRQAPGQGLEWMGRIFPGDGDTDYNGKFKGRVTITADKSTSTAYMELSSLRSEDTAVYYCARNVFDGYWLVYWGQGTLVTVSSGSTSGSGKPGSGEGSDIVMTQTPLSLPVTPGEPASISCRSSKSLLHSNGITYLYWYLQKPGQSPQLLIYQMSNLVSGVPDRFSGSGSGTDFTLKISRVEAEDVGVYYCAQNLELPYTFGGGTKVEIKEFPKPSTPPGSSGGAPGILGFVFTLKEFTLDFSTAKTYVDSLNVIRSAIGTPLQTISSGGTSLLMIDSGSGDNLFAVDVRGIDPEEGRFNNLRLIVERNNLYVTGFVNRTNNVFYRFADFSHVTFPGTTAVTLSGDSSYTTLQRVAGISRTGMQINRHSLTTSYLDLMSHSGTSLTQSVARAMLRFVTVTAEALRFRQIQRGFRTTLDDLSGRSYVMTAEDVDLTLNWGRLSSVLPDYHGQDSVRVGRISFGSINAILGSVALILNCHHHASRVAR

SEQ ID NO: 110 - protein, 512 aa, Artificial Sequence
  source: /note="Description of Artificial Sequence: Synthetic polypeptide"
  source: /note="Multivalent CD20-binding molecule component 64"
  MISC_FEATURE (503)..(503): /note="Cys residue at this position is available to form a homodimer or heterodimer via a disulfide bond with any of SEQ ID NOS 47-175"
QVQLVQSGAEVKKPGSSVKVSCKASGYAFSYSWINWVRQAPGQGLEWMGRIFPGDGDTDYNGKFKGRVTITADKSTSTAYMELSSLRSEDTAVYYCARNVFDGYWLVYWGQGTLVTVSSGGGGSDIVMTQTPLSLPVTPGEPASISCRSSKSLLHSNGITYLYWYLQKPGQSPQLLIYQMSNLVSGVPDRFSGSGSGTDFTLKISRVEAEDVGVYYCAQNLELPYTFGGGTKVEIKEFPKPSTPPGSSGGAPGILGFVFTLKEFTLDFSTAKTYVDSLNVIRSAIGTPLQTISSGGTSLLMIDSGTGDNLFAVDVRGIDPEEGRFNNLRLIVERNNLYVTGFVNRTNNVFYRFADFSHVTFPGTTAVTLSGDSSYTTLQRVAGISRTGMQINRHSLTTSYLDLMSHSGTSLTQSVARAMLRFVTVTAEALRFRQIQRGFRTTLDDLSGRSYVMTAEDVDLTLNWGRLSSVLPDYHGQDSVRVGRISFGSINAILGSVALILNCHHHASRVAR

SEQ ID NO: 111 - protein, 508 aa, Artificial Sequence
  source: /note="Description of Artificial Sequence: Synthetic polypeptide"
  source: /note="Multivalent CD20-binding molecule component 65"
  MISC_FEATURE (503)..(503): /note="Cys residue at this position is available to form a homodimer or heterodimer via a disulfide bond with any of SEQ ID NOS 47-175"
QVQLVQSGAEVKKPGSSVKVSCKASGYAFSYSWINWVRQAPGQGLEWMGRIFPGDGDTDYNGKFKGRVTITADKSTSTAYMELSSLRSEDTAVYYCARNVFDGYWLVYWGQGTLVTVSSGGGGSDIVMTQTPLSLPVTPGEPASISCRSSKSLLHSNGITYLYWYLQKPGQSPQLLIYQMSNLVSGVPDRFSGSGSGTDFTLKISRVEAEDVGVYYCAQNLELPYTFGGGTKVEIKEFPKPSTPPGSSGGAPGILGFVFTLKEFTLDFSTAKTYVDSLNVIRSAIGTPLQTISSGGTSLLMIDSGSGDNLFAVDVRGIAPEEGRFNNLRLIVERNNLYVTGFVNRTNNVFYRFADFSHVTFPGTTAVTLSADSSYTTLQRVAGISRTGMQINRHSLTTSYLDLMSHSATSLTQSVARAMLRFVTVTAEALRFRQIQRGFRTTLDDLSGASYVMTAEDVDLTLNWGRLSSVLPDYHGQDSVRVGRISFGSINAILGSVALILNCHHHAS

SEQ ID NO: 112 - protein, 503 aa, Artificial Sequence
  source: /note="Description of Artificial Sequence: Synthetic polypeptide"
  source: /note="Multivalent CD20-binding molecule component 66"
  MISC_FEATURE (494)..(494): /note="Cys residue at this position is available to form a homodimer or heterodimer via a disulfide bond with any of SEQ ID NOS 47-175"
QVQLVQSGAEVKKPGSSVKVSCKASGYAFSYSWINWVRQAPGQGLEWMGRIFPGDGDTDYNGKFKGRVTITADKSTSTAYMELSSLRSEDTAVYYCARNVFDGYWLVYWGQGTLVTVSSGGGGSDIVMTQTPLSLPVTPGEPASISCRSSKSLLHSNGITYLYWYLQKPGQSPQLLIYQMSNLVSGVPDRFSGSGSGTDFTLKISRVEAEDVGVYYCAQNLELPYTFGGGTKVEIKEFPKPSTPPGSSGGAPKEFTLDFSTAKTYVDSLNVIRSAIGTPLQTISSGGTSLLMIDNLVPMVATVVDVRGIDPEEGRFNNLRLIVERNNLYVTGFVNRTNNVFYRFADFSHVTFPGTTAVTLSGDSSYTTLQRVAGISRTGMQINRHSLTTSYLDLMSHSGTSLTQSVARAMLRFVTVTAEALRFRQIQRGFRTTLDDLSGRSYVMTAEDVDLTLNWGRLSSVLPDYHGQDSVRVGRISFGSINAILGSVALILNCHHHASRVAR

SEQ ID NO: 113 - protein, 500 aa, Artificial Sequence
  source: /note="Description of Artificial Sequence: Synthetic polypeptide"
  source: /note="Multivalent CD20-binding molecule component 67"
  MISC_FEATURE (495)..(495): /note="Cys residue at this position is available to form a homodimer or heterodimer via a disulfide bond with any of SEQ ID NOS 47-175"
QVQLVQSGAEVKKPGSSVKVSCKASGYAFSYSWINWVRQAPGQGLEWMGRIFPGDGDTDYNGKFKGRVTITADKSTSTAYMELSSLRSEDTAVYYCARNVFDGYWLVYWGQGTLVTVSSGSTSGSGKPGSGEGSDIVMTQTPLSLPVTPGEPASISCRSSKSLLHSNGITYLYWYLQKPGQSPQLLIYQMSNLVSGVPDRFSGSGSGTDFTLKISRVEAEDVGVYYCAQNLELPYTFGGGTKVEIKGGGGSGGKEFTLDFSTAKTYVDSLNVIRSAIGTPLQTISSGGTSLLMIDSGSGDNLFAVDVRGIDPEEGRFNNLRLIVERNNLYVTGFVNRTNNVFYRFADFSHVTFPGTTAVTLSGDSSYTTLQRVAGISRTGMQINRHSLTTSYLDLMSHSGTSLTQSVARAMLRFVTVTAEALRFRQIQRGFRTTLDDLSGRSYVMTAEDVDLTLNWGRLSSVLPDYHGQDSVRVGRISFGSINAILGSVALILNCHHHAS

SEQ ID NO: 114 - protein, 513 aa, Artificial Sequence
  source: /note="Description of Artificial Sequence: Synthetic polypeptide"
  source: /note="Multivalent CD20-binding molecule component 68"
  MISC_FEATURE (504)..(504): /note="Cys residue at this position is available to form a homodimer or heterodimer via a disulfide bond with any of SEQ ID NOS 47-175"
DIVMTQTPLSLPVTPGEPASISCRSSKSLLHSNGITYLYWYLQKPGQSPQLLIYQMSNLVSGVPDRFSGSGSGTDFTLKISRVEAEDVGVYYCAQNLELPYTFGGGTKVEIKGSTSGSGKPGSGEGSQVQLVQSGAEVKKPGSSVKVSCKASGYAFSYSWINWVRQAPGQGLEWMGRIFPGDGDTDYNGKFKGRVTITADKSTSTAYMELSSLRSEDTAVYYCARNVFDGYWLVYWGQGTLVTVSSEFPKPSTPPGSSGGAPKEFTLDFSTAKTYVDSLNVIRSAIGTPLQTISSGGTSLLMIDSGSGDNLFAVDVRGIDPEEGRFNNLRLIVERNNLYVTGFVNRTNNVFYRFADFSHVTFPGTTAVTLSGDSSYTTLQRVAGISRTGMQINRHSLTTSYLDLMSHSGTSLTQSVARAMLRFVTVTAEALRFRQIQRGFRTTLDDLSGRSYVMTAEDVDLTLNWGRLSSVLPDYHGQDSVRVGRISFGSINAILGSVALILNCHHHASRVAR

SEQ ID NO: 115 - protein, 516 aa, Artificial Sequence
  source: /note="Description of Artificial Sequence: Synthetic polypeptide"
  source: /note="Multivalent CD20-binding molecule component 69"
  MISC_FEATURE (503)..(503): /note="Cys residue at this position is available to form a homodimer or heterodimer via a disulfide bond with any of SEQ ID NOS 47-175"
DIVMTQTPLSLPVTPGEPASISCRSSKSLLHSNGITYLYWYLQKPGQSPQLLIYQMSNLVSGVPDRFSGSGSGTDFTLKISRVEAEDVGVYYCAQNLELPYTFGGGTKVEIKGGGGSQVQLVQSGAEVKKPGSSVKVSCKASGYAFSYSWINWVRQAPGQGLEWMGRIFPGDGDTDYNGKFKGRVTITADKSTSTAYMELSSLRSEDTAVYYCARNVFDGYWLVYWGQGTLVTVSSEFPKPSTPPGSSGGAPGILGFVFTLKEFTLDFSTAKTYVDSLNVIRSAIGTPLQTISSGGTSLLMIDSGSGDNLFAVDVRGIDPEEGRFNNLRLIVERNNLYVTGFVNRTNNVFYRFADFSHVTFPGTTAVTLSGDSSYTTLQRVAGISRTGMQINRHSLTTSYLDLMSHSGTSLTQSVARAMLRFVTVTAEALRFRQIQRGFRTTLDDLSGRSYVMTAEDVDLTLNWGRLSSVLPDYHGQDSVRVGRISFGSINAILGSVALILNCHHHASRVARKDEL

SEQ ID NO: 116 - protein, 522 aa, Artificial Sequence
  source: /note="Description of Artificial Sequence: Synthetic polypeptide"
  source: /note="Multivalent CD20-binding molecule component 70"
  MISC_FEATURE (513)..(513): /note="Cys residue at this position is available to form a homodimer or heterodimer via a disulfide bond with any of SEQ ID NOS 47-175"
DIVMTQTPLSLPVTPGEPASISCRSSKSLLHSNGITYLYWYLQKPGQSPQLLIYQMSNLVSGVPDRFSGSGSGTDFTLKISRVEAEDVGVYYCAQNLELPYTFGGGTKVEIKGSTSGSGKPGSGEGSQVQLVQSGAEVKKPGSSVKVSCKASGYAFSYSWINWVRQAPGQGLEWMGRIFPGDGDTDYNGKFKGRVTITADKSTSTAYMELSSLRSEDTAVYYCARNVFDGYWLVYWGQGTLVTVSSEFPKPSTPPGSSGGAPGILGFVFTLKEFTLDFSTAKTYVDSLNVIRSAIGTPLQTISSGGTSLLMIDSGTGDNLFAVDVRGIDPEEGRFNNLRLIVERNNLYVTGFVNRTNNVFYRFADFSHVTFPGTTAVTLSGDSSYTTLQRVAGISRTGMQINRHSLTTSYLDLMSHSGTSLTQSVARAMLRFVTVTAEALRFRQIQRGFRTTLDDLSGRSYVMTAEDVDLTLNWGRLSSVLPDYHGQDSVRVGRISFGSINAILGSVALILNCHHHASRVAR

SEQ ID NO: 117 - protein, 522 aa, Artificial Sequence
  source: /note="Description of Artificial Sequence: Synthetic polypeptide"
  source: /note="Multivalent CD20-binding molecule component 71"
  MISC_FEATURE (513)..(513): /note="Cys residue at this position is available to form a homodimer or heterodimer via a disulfide bond with any of SEQ ID NOS 47-175"
DIVMTQTPLSLPVTPGEPASISCRSSKSLLHSNGITYLYWYLQKPGQSPQLLIYQMSNLVSGVPDRFSGSGSGTDFTLKISRVEAEDVGVYYCAQNLELPYTFGGGTKVEIKGSTSGSGKPGSGEGSQVQLVQSGAEVKKPGSSVKVSCKASGYAFSYSWINWVRQAPGQGLEWMGRIFPGDGDTDYNGKFKGRVTITADKSTSTAYMELSSLRSEDTAVYYCARNVFDGYWLVYWGQGTLVTVSSEFPKPSTPPGSSGGAPGILGFVFTLKEFTLDFSTAKTYVDSLNVIRSAIGTPLQTISSGGTSLLMIDSGSGDNLFAVDVRGIAPEEGRFNNLRLIVERNNLYVTGFVNRTNNVFYRFADFSHVTFPGTTAVTLSADSSYTTLQRVAGISRTGMQINRHSLTTSYLDLMSHSATSLTQSVARAMLRFVTVTAEALRFRQIQRGFRTTLDDLSGASYVMTAEDVDLTLNWGRLSSVLPDYHGQDSVRVGRISFGSINAILGSVALILNCHHHASRVAR

SEQ ID NO: 118 - protein, 503 aa, Artificial Sequence
  source: /note="Description of Artificial Sequence: Synthetic polypeptide"
  source: /note="Multivalent CD20-binding molecule component 72"
  MISC_FEATURE (494)..(494): /note="Cys residue at this position is available to form a homodimer or heterodimer via a disulfide bond with any of SEQ ID NOS 47-175"
DIVMTQTPLSLPVTPGEPASISCRSSKSLLHSNGITYLYWYLQKPGQSPQLLIYQMSNLVSGVPDRFSGSGSGTDFTLKISRVEAEDVGVYYCAQNLELPYTFGGGTKVEIKGGGGSQVQLVQSGAEVKKPGSSVKVSCKASGYAFSYSWINWVRQAPGQGLEWMGRIFPGDGDTDYNGKFKGRVTITADKSTSTAYMELSSLRSEDTAVYYCARNVFDGYWLVYWGQGTLVTVSSEFPKPSTPPGSSGGAPKEFTLDFSTAKTYVDSLNVIRSAIGTPLQTISSGGTSLLMIDNLVPMVATVVDVRGIDPEEGRFNNLRLIVERNNLYVTGFVNRTNNVFYRFADFSHVTFPGTTAVTLSGDSSYTTLQRVAGISRTGMQINRHSLTTSYLDLMSHSGTSLTQSVARAMLRFVTVTAEALRFRQIQRGFRTTLDDLSGRSYVMTAEDVDLTLNWGRLSSVLPDYHGQDSVRVGRISFGSINAILGSVALILNCHHHASRVAR

SEQ ID NO: 119 - protein, 514 aa, Artificial Sequence
  source: /note="Description of Artificial Sequence: Synthetic polypeptide"
  source: /note="Multivalent CD20-binding molecule component 73"
  MISC_FEATURE (505)..(505): /note="Cys residue at this position is available to form a homodimer or heterodimer via a disulfide bond with any of SEQ ID NOS 47-175"
DIVMTQTPLSLPVTPGEPASISCRSSKSLLHSNGITYLYWYLQKPGQSPQLLIYQMSNLVSGVPDRFSGSGSGTDFTLKISRVEAEDVGVYYCAQNLELPYTFGGGTKVEIKGGGGSGGGGSGGGGSGGGGSGGGGSQVQLVQSGAEVKKPGSSVKVSCKASGYAFSYSWINWVRQAPGQGLEWMGRIFPGDGDTDYNGKFKGRVTITADKSTSTAYMELSSLRSEDTAVYYCARNVFDGYWLVYWGQGTLVTVSSGGGGSGGKEFTLDFSTAKTYVDSLNVIRSAIGTPLQTISSGGTSLLMIDSGSGDNLFAVDVRGIDPEEGRFNNLRLIVERNNLYVTGFVNRTNNVFYRFADFSHVTFPGTTAVTLSGDSSYTTLQRVAGISRTGMQINRHSLTTSYLDLMSHSGTSLTQSVARAMLRFVTVTAEALRFRQIQRGFRTTLDDLSGRSYVMTAEDVDLTLNWGRLSSVLPDYHGQDSVRVGRISFGSINAILGSVALILNCHHHASAVAA

SEQ ID NO: 120 - protein, 520 aa, Artificial Sequence
  source: /note="Description of Artificial Sequence: Synthetic polypeptide"
  source: /note="Multivalent CD20-binding molecule component 74"
  MISC_FEATURE (242)..(242): /note="Cys residue at this position is available to form a homodimer or heterodimer via a disulfide bond with any of SEQ ID NOS 47-175"
KEFTLDFSTAKTYVDSLNVIRSAIGTPLQTISSGGTSLLMIDSGSGDNLFAVDVRGIDPEEGRFNNLRLIVERNNLYVTGFVNRTNNVFYRFADFSHVTFPGTTAVTLSGDSSYTTLQRVAGISRTGMQINRHSLTTSYLDLMSHSGTSLTQSVARAMLRFVTVTAEALRFRQIQRGFRTTLDDLSGRSYVMTAEDVDLTLNWGRLSSVLPDYHGQDSVRVGRISFGSINAILGSVALILNCHHHASRVAREFPKPSTPPGSSGGAPQAYLQQSGAELVRPGASVKMSCKASGYTFTSYNMHWVKQTPRQGLEWIGAIYPGNGDTSYNQKFKGKATLTVDKSSSTAYMQLSSLTSEDSAVYFCARVVYYSNSYWYFDVWGTGTTVTVSGGGGSGGGGSGGGGSGGGGSGGGGSQIVLSQSPAILSASPGEKVTMTCRASSSVSYMHWYQQKPGSSPKPWIYAPSNLASGVPARFSGSGSGTSYSLTISRVEAEDAATYYCQQWSFNPPTFGAGTKLELKS

SEQ ID NO: 121 - protein, 510 aa, Artificial Sequence
  source: /note="Description of Artificial Sequence: Synthetic polypeptide"
  source: /note="Multivalent CD20-binding molecule component 75"
  MISC_FEATURE (242)..(242): /note="Cys residue at this position is available to form a homodimer or heterodimer via a disulfide bond with any of SEQ ID NOS 47-175"
KEFTLDFSTAKTYVDSLNVIRSAIGTPLQTISSGGTSLLMIDSGSGDNLFAVDVRGIDPEEGRFNNLRLIVERNNLYVTGFVNRTNNVFYRFADFSHVTFPGTTAVTLSGDSSYTTLQRVAGISRTGMQINRHSLTTSYLDLMSHSGTSLTQSVARAMLRFVTVTAEALRFRQIQRGFRTTLDDLSGRSYVMTAEDVDLTLNWGRLSSVLPDYHGQDSVRVGRISFGSINAILGSVALILNCHHHASRVAREFPKPSTPPGSSGGAPQAYLQQSGAELVRPGASVKMSCKASGYTFTSYNMHWVKQTPRQGLEWIGAIYPGNGDTSYNQKFKGKATLTVDKSSSTAYMQLSSLTSEDSAVYFCARVVYYSNSYWYFDVWGTGTTVTVSGSTSGSGKPGSGEGSQIVLSQSPAILSASPGEKVTMTCRASSSVSYMHWYQQKPGSSPKPWIYAPSNLASGVPARFSGSGSGTSYSLTISRVEAEDAATYYCQQWSFNPPTFGAGTKLELKS

SEQ ID NO: 122 - protein, 500 aa, Artificial Sequence
  source: /note="Description of Artificial Sequence: Synthetic polypeptide"
  source: /note="Multivalent CD20-binding molecule component 76"
  MISC_FEATURE (242)..(242): /note="Cys residue at this position is available to form a homodimer or heterodimer via a disulfide bond with any of SEQ ID NOS 47-175"
KEFTLDFSTAKTYVDSLNVIRSAIGTPLQTISSGGTSLLMIDSGTGDNLFAVDVRGIAPEEGRFNNLRLIVERNNLYVTGFVNRTNNVFYRFADFSHVTFPGTTAVTLSADSSYTTLQRVAGISRTGMQINRHSLTTSYLDLMSHSATSLTQSVARAMLRFVTVTAEALRFRQIQRGFRTTLDDLSGASYVMTAEDVDLTLNWGRLSSVLPDYHGQDSVRVGRISFGSINAILGSVALILNCHHHASRVAREFPKPSTPPGSSGGAPQAYLQQSGAELVRPGASVKMSCKASGYTFTSYNMHWVKQTPRQGLEWIGAIYPGNGDTSYNQKFKGKATLTVDKSSSTAYMQLSSLTSEDSAVYFCARVVYYSNSYWYFDVWGTGTTVTVSGGGGSQIVLSQSPAILSASPGEKVTMTCRASSSVSYMHWYQQKPGSSPKPWIYAPSNLASGVPARFSGSGSGTSYSLTISRVEAEDAATYYCQQWSFNPPTFGAGTKLELKS

SEQ ID NO: 123 - protein, 511 aa, Artificial Sequence
  source: /note="Description of Artificial Sequence: Synthetic polypeptide"
  source: /note="Multivalent CD20-binding molecule component 77"
  MISC_FEATURE (242)..(242): /note="Cys residue at this position is available to form a homodimer or heterodimer via a disulfide bond with any of SEQ ID NOS 47-175"
KEFTLDFSTAKTYVDSLNVIRSAIGTPLQTISSGGTSLLMIDSGSGDNLFAVDVRGIAPEEGRFNNLRLIVERNNLYVTGFVNRTNNVFYRFADFSHVTFPGTTAVTLSADSSYTTLQRVAGISRTGMQINRHSLTTSYLDLMSHSATSLTQSVARAMLRFVTVTAEALRFRQIQRGFRTTLDDLSGASYVMTAEDVDLTLNWGRLSSVLPDYHGQDSVRVGRISFGSINAILGSVALILNCHHHASRVARGGGGSGGQAYLQQSGAELVRPGASVKMSCKASGYTFTSYNMHWVKQTPRQGLEWIGAIYPGNGDTSYNQKFKGKATLTVDKSSSTAYMQLSSLTSEDSAVYFCARVVYYSNSYWYFDVWGTGTTVTVSGGGGSGGGGSGGGGSGGGGSGGGGSQIVLSQSPAILSASPGEKVTMTCRASSSVSYMHWYQQKPGSSPKPWIYAPSNLASGVPARFSGSGSGTSYSLTISRVEAEDAATYYCQQWSFNPPTFGAGTKLELKS

SEQ ID NO: 124 - protein, 501 aa, Artificial Sequence
  source: /note="Description of Artificial Sequence: Synthetic polypeptide"
  source: /note="Multivalent CD20-binding molecule component 78"
  MISC_FEATURE (242)..(242): /note="Cys residue at this position is available to form a homodimer or heterodimer via a disulfide bond with any of SEQ ID NOS 47-175"
KEFTLDFSTAKTYVDSLNVIRSAIGTPLQTISSGGTSLLMIDNLVPMVATVVDVRGIDPEEGRFNNLRLIVERNNLYVTGFVNRTNNVFYRFADFSHVTFPGTTAVTLSGDSSYTTLQRVAGISRTGMQINRHSLTTSYLDLMSHSGTSLTQSVARAMLRFVTVTAEALRFRQIQRGFRTTLDDLSGRSYVMTAEDVDLTLNWGRLSSVLPDYHGQDSVRVGRISFGSINAILGSVALILNCHHHASRVARGGGGSGGQAYLQQSGAELVRPGASVKMSCKASGYTFTSYNMHWVKQTPRQGLEWIGAIYPGNGDTSYNQKFKGKATLTVDKSSSTAYMQLSSLTSEDSAVYFCARVVYYSNSYWYFDVWGTGTTVTVSGSTSGSGKPGSGEGSQIVLSQSPAILSASPGEKVTMTCRASSSVSYMHWYQQKPGSSPKPWIYAPSNLASGVPARFSGSGSGTSYSLTISRVEAEDAATYYCQQWSFNPPTFGAGTKLELKS

SEQ ID NO: 125 - protein, 521 aa, Artificial Sequence
  source: /note="Description of Artificial Sequence: Synthetic polypeptide"
  source: /note="Multivalent CD20-binding molecule component 79"
  MISC_FEATURE (242)..(242): /note="Cys residue at this position is available to form a homodimer or heterodimer via a disulfide bond with any of SEQ ID NOS 47-175"
KEFTLDFSTAKTYVDSLNVIRSAIGTPLQTISSGGTSLLMIDSGSGDNLFAVDVRGIDPEEGRFNNLRLIVERNNLYVTGFVNRTNNVFYRFADFSHVTFPGTTAVTLSGDSSYTTLQRVAGISRTGMQINRHSLTTSYLDLMSHSGTSLTQSVARAMLRFVTVTAEALRFRQIQRGFRTTLDDLSGRSYVMTAEDVDLTLNWGRLSSVLPDYHGQDSVRVGRISFGSINAILGSVALILNCHHHASRVAREFPKPSTPPGSSGGAPQVQLQQPGAELVKPGASVKMSCKTSGYTFTSYNVHWVKQTPGQGLEWIGAIYPGNGDTSFNQKFKGKATLTADKSSSTVYMQLSSLTSEDSAVYYCARSNYYGSSYVWFFDVWGAGTTVTVSSGGGGSGGGGSGGGGSGGGGSGGGGSQIVLSQSPTILSASPGEKVTMTCRASSSVSYMDWYQQKPGSSPKPWIYATSNLASGVPARFSGSGSGTSYSLTISRVEAEDAATYYCQQWISNPPTFGAGTKLELK

SEQ ID NO: 126 - protein, 511 aa, Artificial Sequence
  source: /note="Description of Artificial Sequence: Synthetic polypeptide"
  source: /note="Multivalent CD20-binding molecule component 80"
  MISC_FEATURE (242)..(242): /note="Cys residue at this position is available to form a homodimer or heterodimer via a disulfide bond with any of SEQ ID NOS 47-175"
KEFTLDFSTAKTYVDSLNVIRSAIGTPLQTISSGGTSLLMIDSGSGDNLFAVDVRGIDPEEGRFNNLRLIVERNNLYVTGFVNRTNNVFYRFADFSHVTFPGTTAVTLSGDSSYTTLQRVAGISRTGMQINRHSLTTSYLDLMSHSGTSLTQSVARAMLRFVTVTAEALRFRQIQRGFRTTLDDLSGRSYVMTAEDVDLTLNWGRLSSVLPDYHGQDSVRVGRISFGSINAILGSVALILNCHHHASRVAREFPKPSTPPGSSGGAPQVQLQQPGAELVKPGASVKMSCKTSGYTFTSYNVHWVKQTPGQGLEWIGAIYPGNGDTSFNQKFKGKATLTADKSSSTVYMQLSSLTSEDSAVYYCARSNYYGSSYVWFFDVWGAGTTVTVSSGSTSGSGKPGSGEGSQIVLSQSPTILSASPGEKVTMTCRASSSVSYMDWYQQKPGSSPKPWIYATSNLASGVPARFSGSGSGTSYSLTISRVEAEDAATYYCQQWISNPPTFGAGTKLELK

SEQ ID NO: 127 - protein, 501 aa, Artificial Sequence
  source: /note="Description of Artificial Sequence: Synthetic polypeptide"
  source: /note="Multivalent CD20-binding molecule component 81"
  MISC_FEATURE (242)..(242): /note="Cys residue at this position is available to form a homodimer or heterodimer via a disulfide bond with any of SEQ ID NOS 47-175"
KEFTLDFSTAKTYVDSLNVIRSAIGTPLQTISSGGTSLLMIDSGSGDNLFAVDVRGIDPEEGRFNNLRLIVERNNLYVTGFVNRTNNVFYRFADFSHVTFPGTTAVTLSGDSSYTTLQRVAGISRTGMQINRHSLTTSYLDLMSHSGTSLTQSVARAMLRFVTVTAEALRFRQIQRGFRTTLDDLSGRSYVMTAEDVDLTLNWGRLSSVLPDYHGQDSVRVGRISFGSINAILGSVALILNCHHHASRVAREFPKPSTPPGSSGGAPQVQLQQPGAELVKPGASVKMSCKTSGYTFTSYNVHWVKQTPGQGLEWIGAIYPGNGDTSFNQKFKGKATLTADKSSSTVYMQLSSLTSEDSAVYYCARSNYYGSSYVWFFDVWGAGTTVTVSSGGGGSQIVLSQSPTILSASPGEKVTMTCRASSSVSYMDWYQQKPGSSPKPWIYATSNLASGVPARFSGSGSGTSYSLTISRVEAEDAATYYCQQWISNPPTFGAGTKLELK

SEQ ID NO: 128 - protein, 512 aa, Artificial Sequence
  source: /note="Description of Artificial Sequence: Synthetic polypeptide"
  source: /note="Multivalent CD20-binding molecule component 82"
  MISC_FEATURE (242)..(242): /note="Cys residue at this position is available to form a homodimer or heterodimer via a disulfide bond with any of SEQ ID NOS 47-175"
KEFTLDFSTAKTYVDSLNVIRSAIGTPLQTISSGGTSLLMIDSGSGDNLFAVDVRGIDPEEGRFNNLRLIVERNNLYVTGFVNRTNNVFYRFADFSHVTFPGTTAVTLSGDSSYTTLQRVAGISRTGMQINRHSLTTSYLDLMSHSGTSLTQSVARAMLRFVTVTAEALRFRQIQRGFRTTLDDLSGRSYVMTAEDVDLTLNWGRLSSVLPDYHGQDSVRVGRISFGSINAILGSVALILNCHHHASRVARGGGGSGGQVQLQQPGAELVKPGASVKMSCKTSGYTFTSYNVHWVKQTPGQGLEWIGAIYPGNGDTSFNQKFKGKATLTADKSSSTVYMQLSSLTSEDSAVYYCARSNYYGSSYVWFFDVWGAGTTVTVSSGGGGSGGGGSGGGGSGGGGSGGGGSQIVLSQSPTILSASPGEKVTMTCRASSSVSYMDWYQQKPGSSPKPWIYATSNLASGVPARFSGSGSGTSYSLTISRVEAEDAATYYCQQWISNPPTFGAGTKLELK

SEQ ID NO: 129 - protein, 502 aa, Artificial Sequence
  source: /note="Description of Artificial Sequence: Synthetic polypeptide"
  source: /note="Multivalent CD20-binding molecule component 83"
  MISC_FEATURE (242)..(242): /note="Cys residue at this position is available to form a homodimer or heterodimer via a disulfide bond with any of SEQ ID NOS 47-175"
KEFTLDFSTAKTYVDSLNVIRSAIGTPLQTISSGGTSLLMIDSGSGDNLFAVDVRGIDPEEGRFNNLRLIVERNNLYVTGFVNRTNNVFYRFADFSHVTFPGTTAVTLSGDSSYTTLQRVAGISRTGMQINRHSLTTSYLDLMSHSGTSLTQSVARAMLRFVTVTAEALRFRQIQRGFRTTLDDLSGRSYVMTAEDVDLTLNWGRLSSVLPDYHGQDSVRVGRISFGSINAILGSVALILNCHHHASRVARGGGGSGGQVQLQQPGAELVKPGASVKMSCKTSGYTFTSYNVHWVKQTPGQGLEWIGAIYPGNGDTSFNQKFKGKATLTADKSSSTVYMQLSSLTSEDSAVYYCARSNYYGSSYVWFFDVWGAGTTVTVSSGSTSGSGKPGSGEGSQIVLSQSPTILSASPGEKVTMTCRASSSVSYMDWYQQKPGSSPKPWIYATSNLASGVPARFSGSGSGTSYSLTISRVEAEDAATYYCQQWISNPPTFGAGTKLELK

SEQ ID NO: 130 - protein, 492 aa, Artificial Sequence
  source: /note="Description of Artificial Sequence: Synthetic polypeptide"
  source: /note="Multivalent CD20-binding molecule component 84"
  MISC_FEATURE (242)..(242): /note="Cys residue at this position is available to form a homodimer or heterodimer via a disulfide bond with any of SEQ ID NOS 47-175"
KEFTLDFSTAKTYVDSLNVIRSAIGTPLQTISSGGTSLLMIDSGTGDNLFAVDVRGIDPEEGRFNNLRLIVERNNLYVTGFVNRTNNVFYRFADFSHVTFPGTTAVTLSGDSSYTTLQRVAGISRTGMQINRHSLTTSYLDLMSHSGTSLTQSVARAMLRFVTVTAEALRFRQIQRGFRTTLDDLSGRSYVMTAEDVDLTLNWGRLSSVLPDYHGQDSVRVGRISFGSINAILGSVALILNCHHHASRVARGGGGSGGQVQLQQPGAELVKPGASVKMSCKTSGYTFTSYNVHWVKQTPGQGLEWIGAIYPGNGDTSFNQKFKGKATLTADKSSSTVYMQLSSLTSEDSAVYYCARSNYYGSSYVWFFDVWGAGTTVTVSSGGGGSQIVLSQSPTILSASPGEKVTMTCRASSSVSYMDWYQQKPGSSPKPWIYATSNLASGVPARFSGSGSGTSYSLTISRVEAEDAATYYCQQWISNPPTFGAGTKLELK

SEQ ID NO: 131 - protein, 517 aa, Artificial Sequence
  source: /note="Description of Artificial Sequence: Synthetic polypeptide"
  source: /note="Multivalent CD20-binding molecule component 85"
  MISC_FEATURE (242)..(242): /note="Cys residue at this position is available to form a homodimer or heterodimer via a disulfide bond with any of SEQ ID NOS 47-175"
KEFTLDFSTAKTYVDSLNVIRSAIGTPLQTISSGGTSLLMIDSGSGDNLFAVDVRGIAPEEGRFNNLRLIVERNNLYVTGFVNRTNNVFYRFADFSHVTFPGTTAVTLSADSSYTTLQRVAGISRTGMQINRHSLTTSYLDLMSHSATSLTQSVARAMLRFVTVTAEALRFRQIQRGFRTTLDDLSGASYVMTAEDVDLTLNWGRLSSVLPDYHGQDSVRVGRISFGSINAILGSVALILNCHHHASEFPKPSTPPGSSGGAPQVQLQQPGAELVKPGASVKMSCKTSGYTFTSYNVHWVKQTPGQGLEWIGAIYPGNGDTSFNQKFKGKATLTADKSSSTVYMQLSSLTSEDSAVYYCARSNYYGSSYVWFFDVWGAGTTVTVSSGGGGSGGGGSGGGGSGGGGSGGGGSQIVLSQSPTILSASPGEKVTMTCRASSSVSYMDWYQQKPGSSPKPWIYATSNLASGVPARFSGSGSGTSYSLTISRVEAEDAATYYCQQWISNPPTFGAGTKLELK

SEQ ID NO: 132 - protein, 511 aa, Artificial Sequence
  source: /note="Description of Artificial Sequence: Synthetic polypeptide"
  source: /note="Multivalent CD20-binding molecule component 86"
  MISC_FEATURE (242)..(242): /note="Cys residue at this position is available to form a homodimer or heterodimer via a disulfide bond with any of SEQ ID NOS 47-175"
KEFTLDFSTAKTYVDSLNVIRSAIGTPLQTISSGGTSLLMIDNLVPMVATVVDVRGIDPEEGRFNNLRLIVERNNLYVTGFVNRTNNVFYRFADFSHVTFPGTTAVTLSGDSSYTTLQRVAGISRTGMQINRHSLTTSYLDLMSHSGTSLTQSVARAMLRFVTVTAEALRFRQIQRGFRTTLDDLSGRSYVMTAEDVDLTLNWGRLSSVLPDYHGQDSVRVGRISFGSINAILGSVALILNCHHHASRVAREFPKPSTPPGSSGGAPQVQLQQPGAELVKPGASVKMSCKTSGYTFTSYNVHWVKQTPGQGLEWIGAIYPGNGDTSFNQKFKGKATLTADKSSSTVYMQLSSLTSEDSAVYYCARSNYYGSSYVWFFDVWGAGTTVTVSSGSTSGSGKPGSGEGSQIVLSQSPTILSASPGEKVTMTCRASSSVSYMDWYQQKPGSSPKPWIYATSNLASGVPARFSGSGSGTSYSLTISRVEAEDAATYYCQQWISNPPTFGAGTKLELK

SEQ ID NO: 133 - protein, 524 aa, Artificial Sequence
  source: /note="Description of Artificial Sequence: Synthetic polypeptide"
  source: /note="Multivalent CD20-binding molecule component 87"
  MISC_FEATURE (242)..(242): /note="Cys residue at this position is available to form a homodimer or heterodimer via a disulfide bond with any of SEQ ID NOS 47-175"
KEFTLDFSTAKTYVDSLNVIRSAIGTPLQTISSGGTSLLMIDSGSGDNLFAVDVRGIDPEEGRFNNLRLIVERNNLYVTGFVNRTNNVFYRFADFSHVTFPGTTAVTLSGDSSYTTLQRVAGISRTGMQINRHSLTTSYLDLMSHSGTSLTQSVARAMLRFVTVTAEALRFRQIQRGFRTTLDDLSGRSYVMTAEDVDLTLNWGRLSSVLPDYHGQDSVRVGRISFGSINAILGSVALILNCHHHASRVAREFPKPSTPPGSSGGAPQVQLQQPGAELVKPGASVKMSCKTSGYTFTSYNVHWVKQTPGQGLEWIGAIYPGNGDTSFNQKFKGKATLTADKSSSTVYMQLSSLTSEDSAVYYCARSNYYGSSYVWFFDVWGAGTTVTVSSGGGGSGGGGSGGGGSGGGGSGGGGSQIVLSQSPTILSASPGEKVTMTCRASSSVSYMDWYQQKPGSSPKPWIYATSNLASGVPARFSGSGSGTSYSLTISRVEAEDAATYYCQQWISNPPTFGAGTKLELKDEL

SEQ ID NO: 134 - protein, 514 aa, Artificial Sequence
  source: /note="Description of Artificial Sequence: Synthetic polypeptide"
  source: /note="Multivalent CD20-binding molecule component 88"
  MISC_FEATURE (242)..(242): /note="Cys residue at this position is available to form a homodimer or heterodimer via a disulfide bond with any of SEQ ID NOS 47-175"
KEFTLDFSTAKTYVDSLNVIRSAIGTPLQTISSGGTSLLMIDSGSGDNLFAVDVRGIDPEEGRFNNLRLIVERNNLYVTGFVNRTNNVFYRFADFSHVTFPGTTAVTLSGDSSYTTLQRVAGISRTGMQINRHSLTTSYLDLMSHSGTSLTQSVARAMLRFVTVTAEALRFRQIQRGFRTTLDDLSGRSYVMTAEDVDLTLNWGRLSSVLPDYHGQDSVRVGRISFGSINAILGSVALILNCHHHASRVAREFPKPSTPPGSSGGAPQVQLQQPGAELVKPGASVKMSCKTSGYTFTSYNVHWVKQTPGQGLEWIGAIYPGNGDTSFNQKFKGKATLTADKSSSTVYMQLSSLTSEDSAVYYCARSNYYGSSYVWFFDVWGAGTTVTVSSGSTSGSGKPGSGEGSQIVLSQSPTILSASPGEKVTMTCRASSSVSYMDWYQQKPGSSPKPWIYATSNLASGVPARFSGSGSGTSYSLTISRVEAEDAATYYCQQWISNPPTFGAGTKLELKDEL

SEQ ID NO: 135 - protein, 504 aa, Artificial Sequence
  source: /note="Description of Artificial Sequence: Synthetic polypeptide"
  source: /note="Multivalent CD20-binding molecule component 89"
  MISC_FEATURE (242)..(242): /note="Cys residue at this position is available to form a homodimer or heterodimer via a disulfide bond with any of SEQ ID NOS 47-175"
KEFTLDFSTAKTYVDSLNVIRSAIGTPLQTISSGGTSLLMIDSGSGDNLFAVDVRGIDPEEGRFNNLRLIVERNNLYVTGFVNRTNNVFYRFADFSHVTFPGTTAVTLSGDSSYTTLQRVAGISRTGMQINRHSLTTSYLDLMSHSGTSLTQSVARAMLRFVTVTAEALRFRQIQRGFRTTLDDLSGRSYVMTAEDVDLTLNWGRLSSVLPDYHGQDSVRVGRISFGSINAILGSVALILNCHHHASRVAREFPKPSTPPGSSGGAPQVQLQQPGAELVKPGASVKMSCKTSGYTFTSYNVHWVKQTPGQGLEWIGAIYPGNGDTSFNQKFKGKATLTADKSSSTVYMQLSSLTSEDSAVYYCARSNYYGSSYVWFFDVWGAGTTVTVSSGGGGSQIVLSQSPTILSASPGEKVTMTCRASSSVSYMDWYQQKPGSSPKPWIYATSNLASGVPARFSGSGSGTSYSLTISRVEAEDAATYYCQQWISNPPTFGAGTKLELKDEL

SEQ ID NO: 136 - protein, 515 aa, Artificial Sequence
  source: /note="Description of Artificial Sequence: Synthetic polypeptide"
  source: /note="Multivalent CD20-binding molecule component 90"
  MISC_FEATURE (242)..(242): /note="Cys residue at this position is available to form a homodimer or heterodimer via a disulfide bond with any of SEQ ID NOS 47-175"
KEFTLDFSTAKTYVDSLNVIRSAIGTPLQTISSGGTSLLMIDSGSGDNLFAVDVRGIDPEEGRFNNLRLIVERNNLYVTGFVNRTNNVFYRFADFSHVTFPGTTAVTLSGDSSYTTLQRVAGISRTGMQINRHSLTTSYLDLMSHSGTSLTQSVARAMLRFVTVTAEALRFRQIQRGFRTTLDDLSGRSYVMTAEDVDLTLNWGRLSSVLPDYHGQDSVRVGRISFGSINAILGSVALILNCHHHASRVARGGGGSGGQVQLQQPGAELVKPGASVKMSCKTSGYTFTSYNVHWVKQTPGQGLEWIGAIYPGNGDTSFNQKFKGKATLTADKSSSTVYMQLSSLTSEDSAVYYCARSNYYGSSYVWFFDVWGAGTTVTVSSGGGGSGGGGSGGGGSGGGGSGGGGSQIVLSQSPTILSASPGEKVTMTCRASSSVSYMDWYQQKPGSSPKPWIYATSNLASGVPARFSGSGSGTSYSLTISRVEAEDAATYYCQQWISNPPTFGAGTKLELKDEL

SEQ ID NO: 137 - protein, 505 aa, Artificial Sequence
  source: /note="Description of Artificial Sequence: Synthetic polypeptide"
  source: /note="Multivalent CD20-binding molecule component 91"
  MISC_FEATURE (242)..(242): /note="Cys residue at this position is available to form a homodimer or heterodimer via a disulfide bond with any of SEQ ID NOS 47-175"
KEFTLDFSTAKTYVDSLNVIRSAIGTPLQTISSGGTSLLMIDSGSGDNLFAVDVRGIDPEEGRFNNLRLIVERNNLYVTGFVNRTNNVFYRFADFSHVTFPGTTAVTLSGDSSYTTLQRVAGISRTGMQINRHSLTTSYLDLMSHSGTSLTQSVARAMLRFVTVTAEALRFRQIQRGFRTTLDDLSGRSYVMTAEDVDLTLNWGRLSSVLPDYHGQDSVRVGRISFGSINAILGSVALILNCHHHASRVARGGGGSGGQVQLQQPGAELVKPGASVKMSCKTSGYTFTSYNVHWVKQTPGQGLEWIGAIYPGNGDTSFNQKFKGKATLTADKSSSTVYMQLSSLTSEDSAVYYCARSNYYGSSYVWFFDVWGAGTTVTVSSGSTSGSGKPGSGEGSQIVLSQSPTILSASPGEKVTMTCRASSSVSYMDWYQQKPGSSPKPWIYATSNLASGVPARFSGSGSGTSYSLTISRVEAEDAATYYCQQWISNPPTFGAGTKLELKDEL

SEQ ID NO: 138 - protein, 495 aa, Artificial Sequence
  source: /note="Description of Artificial Sequence: Synthetic polypeptide"
  source: /note="Multivalent CD20-binding molecule component 92"
  MISC_FEATURE (242)..(242): /note="Cys residue at this position is available to form a homodimer or heterodimer via a disulfide bond with any of SEQ ID NOS 47-175"
KEFTLDFSTAKTYVDSLNVIRSAIGTPLQTISSGGTSLLMIDSGTGDNLFAVDVRGIDPEEGRFNNLRLIVERNNLYVTGFVNRTNNVFYRFADFSHVTFPGTTAVTLSGDSSYTTLQRVAGISRTGMQINRHSLTTSYLDLMSHSGTSLTQSVARAMLRFVTVTAEALRFRQIQRGFRTTLDDLSGRSYVMTAEDVDLTLNWGRLSSVLPDYHGQDSVRVGRISFGSINAILGSVALILNCHHHASRVARGGGGSGGQVQLQQPGAELVKPGASVKMSCKTSGYTFTSYNVHWVKQTPGQGLEWIGAIYPGNGDTSFNQKFKGKATLTADKSSSTVYMQLSSLTSEDSAVYYCARSNYYGSSYVWFFDVWGAGTTVTVSSGGGGSQIVLSQSPTILSASPGEKVTMTCRASSSVSYMDWYQQKPGSSPKPWIYATSNLASGVPARFSGSGSGTSYSLTISRVEAEDAATYYCQQWISNPPTFGAGTKLELKDEL

SEQ ID NO: 139 - protein, 520 aa, Artificial Sequence
  source: /note="Description of Artificial Sequence: Synthetic polypeptide"
  source: /note="Multivalent CD20-binding molecule component 93"
  MISC_FEATURE (242)..(242): /note="Cys residue at this position is available to form a homodimer or heterodimer via a disulfide bond with any of SEQ ID NOS 47-175"
KEFTLDFSTAKTYVDSLNVIRSAIGTPLQTISSGGTSLLMIDSGSGDNLFAVDVRGIAPEEGRFNNLRLIVERNNLYVTGFVNRTNNVFYRFADFSHVTFPGTTAVTLSADSSYTTLQRVAGISRTGMQINRHSLTTSYLDLMSHSATSLTQSVARAMLRFVTVTAEALRFRQIQRGFRTTLDDLSGASYVMTAEDVDLTLNWGRLSSVLPDYHGQDSVRVGRISFGSINAILGSVALILNCHHHASEFPKPSTPPGSSGGAPQVQLQQPGAELVKPGASVKMSCKTSGYTFTSYNVHWVKQTPGQGLEWIGAIYPGNGDTSFNQKFKGKATLTADKSSSTVYMQLSSLTSEDSAVYYCARSNYYGSSYVWFFDVWGAGTTVTVSSGGGGSGGGGSGGGGSGGGGSGGGGSQIVLSQSPTILSASPGEKVTMTCRASSSVSYMDWYQQKPGSSPKPWIYATSNLASGVPARFSGSGSGTSYSLTISRVEAEDAATYYCQQWISNPPTFGAGTKLELKDEL

SEQ ID NO: 140 - protein, 514 aa, Artificial Sequence
  source: /note="Description of Artificial Sequence: Synthetic polypeptide"
  source: /note="Multivalent CD20-binding molecule component 94"
  MISC_FEATURE (242)..(242): /note="Cys residue at this position is available to form a homodimer or heterodimer via a disulfide bond with any of SEQ ID NOS 47-175"
KEFTLDFSTAKTYVDSLNVIRSAIGTPLQTISSGGTSLLMIDNLVPMVATVVDVRGIDPEEGRFNNLRLIVERNNLYVTGFVNRTNNVFYRFADFSHVTFPGTTAVTLSGDSSYTTLQRVAGISRTGMQINRHSLTTSYLDLMSHSGTSLTQSVARAMLRFVTVTAEALRFRQIQRGFRTTLDDLSGRSYVMTAEDVDLTLNWGRLSSVLPDYHGQDSVRVGRISFGSINAILGSVALILNCHHHASRVAREFPKPSTPPGSSGGAPQVQLQQPGAELVKPGASVKMSCKTSGYTFTSYNVHWVKQTPGQGLEWIGAIYPGNGDTSFNQKFKGKATLTADKSSSTVYMQLSSLTSEDSAVYYCARSNYYGSSYVWFFDVWGAGTTVTVSSGSTSGSGKPGSGEGSQIVLSQSPTILSASPGEKVTMTCRASSSVSYMDWYQQKPGSSPKPWIYATSNLASGVPARFSGSGSGTSYSLTISRVEAEDAATYYCQQWISNPPTFGAGTKLELKDEL

SEQ ID NO: 141 - protein, 513 aa, Artificial Sequence
  source: /note="Description of Artificial Sequence: Synthetic polypeptide"
  source: /note="Multivalent CD20-binding molecule component 95"
  MISC_FEATURE (242)..(242): /note="Cys residue at this position is available to form a homodimer or heterodimer via a disulfide bond with any of SEQ ID NOS 47-175"
KEFTLDFSTAKTYVDSLNVIRSAIGTPLQTISSGGTSLLMIDSGSGDNLFAVDVRGIDPEEGRFNNLRLIVERNNLYVTGFVNRTNNVFYRFADFSHVTFPGTTAVTLSGDSSYTTLQRVAGISRTGMQINRHSLTTSYLDLMSHSGTSLTQSVARAMLRFVTVTAEALRFRQIQRGFRTTLDDLSGRSYVMTAEDVDLTLNWGRLSSVLPDYHGQDSVRVGRISFGSINAILGSVALILNCHHHASRVAREFPKPSTPPGSSGGAPQVQLVQSGAEVKKPGSSVKVSCKASGYAFSYSWINWVRQAPGQGLEWMGRIFPGDGDTDYNGKFKGRVTITADKSTSTAYMELSSLRSEDTAVYYCARNVFDGYWLVYWGQGTLVTVSSGSTSGSGKPGSGEGSDIVMTQTPLSLPVTPGEPASISCRSSKSLLHSNGITYLYWYLQKPGQSPQLLIYQMSNLVSGVPDRFSGSGSGTDFTLKISRVEAEDVGVYYCAQNLELPYTFGGGTKVEIK

SEQ ID NO: 142 - protein, 494 aa, Artificial Sequence
  source: /note="Description of Artificial Sequence: Synthetic polypeptide"
  source: /note="Multivalent CD20-binding molecule component 96"
  MISC_FEATURE (242)..(242): /note="Cys residue at this position is available to form a homodimer or heterodimer via a disulfide bond with any of SEQ ID NOS 47-175"
KEFTLDFSTAKTYVDSLNVIRSAIGTPLQTISSGGTSLLMIDSGSGDNLFAVDVRGIDPEEGRFNNLRLIVERNNLYVTGFVNRTNNVFYRFADFSHVTFPGTTAVTLSGDSSYTTLQRVAGISRTGMQINRHSLTTSYLDLMSHSGTSLTQSVARAMLRFVTVTAEALRFRQIQRGFRTTLDDLSGRSYVMTAEDVDLTLNWGRLSSVLPDYHGQDSVRVGRISFGSINAILGSVALILNCHHHASRVARGGGGSGGQVQLVQSGAEVKKPGSSVKVSCKASGYAFSYSWINWVRQAPGQGLEWMGRIFPGDGDTDYNGKFKGRVTITADKSTSTAYMELSSLRSEDTAVYYCARNVFDGYWLVYWGQGTLVTVSSGGGGSDIVMTQTPLSLPVTPGEPASISCRSSKSLLHSNGITYLYWYLQKPGQSPQLLIYQMSNLVSGVPDRFSGSGSGTDFTLKISRVEAEDVGVYYCAQNLELPYTFGGGTKVEIK

SEQ ID NO: 143 - protein, 523 aa, Artificial Sequence
  source: /note="Description of Artificial Sequence: Synthetic polypeptide"
  source: /note="Multivalent CD20-binding molecule component 97"
  MISC_FEATURE (242)..(242): /note="Cys residue at this position is available to form a homodimer or heterodimer via a disulfide bond with any of SEQ ID NOS 47-175"
KEFTLDFSTAKTYVDSLNVIRSAIGTPLQTISSGGTSLLMIDSGTGDNLFAVDVRGIDPEEGRFNNLRLIVERNNLYVTGFVNRTNNVFYRFADFSHVTFPGTTAVTLSGDSSYTTLQRVAGISRTGMQINRHSLTTSYLDLMSHSGTSLTQSVARAMLRFVTVTAEALRFRQIQRGFRTTLDDLSGRSYVMTAEDVDLTLNWGRLSSVLPDYHGQDSVRVGRISFGSINAILGSVALILNCHHHASRVAREFPKPSTPPGSSGGAPQVQLVQSGAEVKKPGSSVKVSCKASGYAFSYSWINWVRQAPGQGLEWMGRIFPGDGDTDYNGKFKGRVTITADKSTSTAYMELSSLRSEDTAVYYCARNVFDGYWLVYWGQGTLVTVSSGGGGSGGGGSGGGGSGGGGSGGGGSDIVMTQTPLSLPVTPGEPASISCRSSKSLLHSNGITYLYWYLQKPGQSPQLLIYQMSNLVSGVPDRFSGSGSGTDFTLKISRVEAEDVGVYYCAQNLELPYTFGGGTKVEIK

SEQ ID NO: 144 - protein, 503 aa, Artificial Sequence
  source: /note="Description of Artificial Sequence: Synthetic polypeptide"
  source: /note="Multivalent CD20-binding molecule component 98"
  MISC_FEATURE (242)..(242): /note="Cys residue at this position is available to form a homodimer or heterodimer via a disulfide bond with any of SEQ ID NOS 47-175"
KEFTLDFSTAKTYVDSLNVIRSAIGTPLQTISSGGTSLLMIDSGSGDNLFAVDVRGIAPEEGRFNNLRLIVERNNLYVTGFVNRTNNVFYRFADFSHVTFPGTTAVTLSADSSYTTLQRVAGISRTGMQINRHSLTTSYLDLMSHSATSLTQSVARAMLRFVTVTAEALRFRQIQRGFRTTLDDLSGASYVMTAEDVDLTLNWGRLSSVLPDYHGQDSVRVGRISFGSINAILGSVALILNCHHHASRVAREFPKPSTPPGSSGGAPQVQLVQSGAEVKKPGSSVKVSCKASGYAFSYSWINWVRQAPGQGLEWMGRIFPGDGDTDYNGKFKGRVTITADKSTSTAYMELSSLRSEDTAVYYCARNVFDGYWLVYWGQGTLVTVSSGGGGSDIVMTQTPLSLPVTPGEPASISCRSSKSLLHSNGITYLYWYLQKPGQSPQLLIYQMSNLVSGVPDRFSGSGSGTDFTLKISRVEAEDVGVYYCAQNLELPYTFGGGTKVEIK

SEQ ID NO: 145 - protein, 513 aa, Artificial Sequence
  source: /note="Description of Artificial Sequence: Synthetic polypeptide"
  source: /note="Multivalent CD20-binding molecule component 99"
  MISC_FEATURE (242)..(242): /note="Cys residue at this position is available to form a homodimer or heterodimer via a disulfide bond with any of SEQ ID NOS 47-175"
KEFTLDFSTAKTYVDSLNVIRSAIGTPLQTISSGGTSLLMIDNLVPMVATVVDVRGIDPEEGRFNNLRLIVERNNLYVTGFVNRTNNVFYRFADFSHVTFPGTTAVTLSGDSSYTTLQRVAGISRTGMQINRHSLTTSYLDLMSHSGTSLTQSVARAMLRFVTVTAEALRFRQIQRGFRTTLDDLSGRSYVMTAEDVDLTLNWGRLSSVLPDYHGQDSVRVGRISFGSINAILGSVALILNCHHHASRVAREFPKPSTPPGSSGGAPQVQLVQSGAEVKKPGSSVKVSCKASGYAFSYSWINWVRQAPGQGLEWMGRIFPGDGDTDYNGKFKGRVTITADKSTSTAYMELSSLRSEDTAVYYCARNVFDGYWLVYWGQGTLVTVSSGSTSGSGKPGSGEGSDIVMTQTPLSLPVTPGEPASISCRSSKSLLHSNGITYLYWYLQKPGQSPQLLIYQMSNLVSGVPDRFSGSGSGTDFTLKISRVEAEDVGVYYCAQNLELPYTFGGGTKVEIK

SEQ ID NO: 146 - protein, 513 aa, Artificial Sequence
  source: /note="Description of Artificial Sequence: Synthetic polypeptide"
  source: /note="Multivalent CD20-binding molecule component 100"
  MISC_FEATURE (242)..(242): /note="Cys residue at this position is available to form a homodimer or heterodimer via a disulfide bond with any of SEQ ID NOS 47-175"
KEFTLDFSTAKTYVDSLNVIRSAIGTPLQTISSGGTSLLMIDSGSGDNLFAVDVRGIDPEEGRFNNLRLIVERNNLYVTGFVNRTNNVFYRFADFSHVTFPGTTAVTLSGDSSYTTLQRVAGISRTGMQINRHSLTTSYLDLMSHSGTSLTQSVARAMLRFVTVTAEALRFRQIQRGFRTTLDDLSGRSYVMTAEDVDLTLNWGRLSSVLPDYHGQDSVRVGRISFGSINAILGSVALILNCHHHASRVAREFPKPSTPPGSSGGAPDIVMTQTPLSLPVTPGEPASISCRSSKSLLHSNGITYLYWYLQKPGQSPQLLIYQMSNLVSGVPDRFSGSGSGTDFTLKISRVEAEDVGVYYCAQNLELPYTFGGGTKVEIKGSTSGSGKPGSGEGSQVQLVQSGAEVKKPGSSVKVSCKASGYAFSYSWINWVRQAPGQGLEWMGRIFPGDGDTDYNGKFKGRVTITADKSTSTAYMELSSLRSEDTAVYYCARNVFDGYWLVYWGQGTLVTVSS

SEQ ID NO: 147 - protein, 514 aa, Artificial Sequence
  source: /note="Description of Artificial Sequence: Synthetic polypeptide"
  source: /note="Multivalent CD20-binding molecule component 101"
  MISC_FEATURE (242)..(242): /note="Cys residue at this position is available to form a homodimer or heterodimer via a disulfide bond with any of SEQ ID NOS 47-175"
KEFTLDFSTAKTYVDSLNVIRSAIGTPLQTISSGGTSLLMIDSGSGDNLFAVDVRGIDPEEGRFNNLRLIVERNNLYVTGFVNRTNNVFYRFADFSHVTFPGTTAVTLSGDSSYTTLQRVAGISRTGMQINRHSLTTSYLDLMSHSGTSLTQSVARAMLRFVTVTAEALRFRQIQRGFRTTLDDLSGRSYVMTAEDVDLTLNWGRLSSVLPDYHGQDSVRVGRISFGSINAILGSVALILNCHHHASRVARGGGGSGGDIVMTQTPLSLPVTPGEPASISCRSSKSLLHSNGITYLYWYLQKPGQSPQLLIYQMSNLVSGVPDRFSGSGSGTDFTLKISRVEAEDVGVYYCAQNLELPYTFGGGTKVEIKGGGGSGGGGSGGGGSGGGGSGGGGSQVQLVQSGAEVKKPGSSVKVSCKASGYAFSYSWINWVRQAPGQGLEWMGRIFPGDGDTDYNGKFKGRVTITADKSTSTAYMELSSLRSEDTAVYYCARNVFDGYWLVYWGQGTLVTVSS

SEQ ID NO: 148 - protein, 494 aa, Artificial Sequence
  source: /note="Description of Artificial Sequence: Synthetic polypeptide"
  source: /note="Multivalent CD20-binding molecule component 102"
  MISC_FEATURE (242)..(242): /note="Cys residue at this position is available to form a homodimer or heterodimer via a disulfide bond with any of SEQ ID NOS 47-175"
KEFTLDFSTAKTYVDSLNVIRSAIGTPLQTISSGGTSLLMIDSGTGDNLFAVDVRGIDPEEGRFNNLRLIVERNNLYVTGFVNRTNNVFYRFADFSHVTFPGTTAVTLSGDSSYTTLQRVAGISRTGMQINRHSLTTSYLDLMSHSGTSLTQSVARAMLRFVTVTAEALRFRQIQRGFRTTLDDLSGRSYVMTAEDVDLTLNWGRLSSVLPDYHGQDSVRVGRISFGSINAILGSVALILNCHHHASRVARGGGGSGGDIVMTQTPLSLPVTPGEPASISCRSSKSLLHSNGITYLYWYLQKPGQSPQLLIYQMSNLVSGVPDRFSGSGSGTDFTLKISRVEAEDVGVYYCAQNLELPYTFGGGTKVEIKGGGGSQVQLVQSGAEVKKPGSSVKVSCKASGYAFSYSWINWVRQAPGQGLEWMGRIFPGDGDTDYNGKFKGRVTITADKSTSTAYMELSSLRSEDTAVYYCARNVFDGYWLVYWGQGTLVTVSS

SEQ ID NO: 149 - protein, 509 aa, Artificial Sequence
  source: /note="Description of Artificial Sequence: Synthetic polypeptide"
  source: /note="Multivalent CD20-binding molecule component 103"
  MISC_FEATURE (242)..(242): /note="Cys residue at this position is available to form a homodimer or heterodimer via a disulfide bond with any of SEQ ID NOS 47-175"
KEFTLDFSTAKTYVDSLNVIRSAIGTPLQTISSGGTSLLMIDSGSGDNLFAVDVRGIAPEEGRFNNLRLIVERNNLYVTGFVNRTNNVFYRFADFSHVTFPGTTAVTLSADSSYTTLQRVAGISRTGMQINRHSLTTSYLDLMSHSATSLTQSVARAMLRFVTVTAEALRFRQIQRGFRTTLDDLSGASYVMTAEDVDLTLNWGRLSSVLPDYHGQDSVRVGRISFGSINAILGSVALILNCHHHASEFPKPSTPPGSSGGAPDIVMTQTPLSLPVTPGEPASISCRSSKSLLHSNGITYLYWYLQKPGQSPQLLIYQMSNLVSGVPDRFSGSGSGTDFTLKISRVEAEDVGVYYCAQNLELPYTFGGGTKVEIKGSTSGSGKPGSGEGSQVQLVQSGAEVKKPGSSVKVSCKASGYAFSYSWINWVRQAPGQGLEWMGRIFPGDGDTDYNGKFKGRVTITADKSTSTAYMELSSLRSEDTAVYYCARNVFDGYWLVYWGQGTLVTVSS

SEQ ID NO: 150 - protein, 513 aa, Artificial Sequence
  source: /note="Description of Artificial Sequence: Synthetic polypeptide"
  source: /note="Multivalent CD20-binding molecule component 104"
  MISC_FEATURE (242)..(242): /note="Cys residue at this position is available to form a homodimer or heterodimer via a disulfide bond with any of SEQ ID NOS 47-175"
KEFTLDFSTAKTYVDSLNVIRSAIGTPLQTISSGGTSLLMIDNLVPMVATVVDVRGIDPEEGRFNNLRLIVERNNLYVTGFVNRTNNVFYRFADFSHVTFPGTTAVTLSGDSSYTTLQRVAGISRTGMQINRHSLTTSYLDLMSHSGTSLTQSVARAMLRFVTVTAEALRFRQIQRGFRTTLDDLSGRSYVMTAEDVDLTLNWGRLSSVLPDYHGQDSVRVGRISFGSINAILGSVALILNCHHHASRVAREFPKPSTPPGSSGGAPDIVMTQTPLSLPVTPGEPASISCRSSKSLLHSNGITYLYWYLQKPGQSPQLLIYQMSNLVSGVPDRFSGSGSGTDFTLKISRVEAEDVGVYYCAQNLELPYTFGGGTKVEIKGSTSGSGKPGSGEGSQVQLVQSGAEVKKPGSSVKVSCKASGYAFSYSWINWVRQAPGQGLEWMGRIFPGDGDTDYNGKFKGRVTITADKSTSTAYMELSSLRSEDTAVYYCARNVFDGYWLVYWGQGTLVTVSS

SEQ ID NO: 151 - protein, 509 aa, Artificial Sequence
  source: /note="Description of Artificial Sequence: Synthetic polypeptide"
  source: /note="Multivalent CD20-binding molecule component 105"
  MISC_FEATURE (242)..(242): /note="Cys residue at this position is available to form a homodimer or heterodimer via a disulfide bond with any of SEQ ID NOS 47-175"
KEFTLDFSTAKTYVDSLNVIRSAIGTPLQTISSGGTSLLMIDSGSGDNLFAVDVRGIDPEEGRFNNLRLIVERNNLYVTGFVNRTNNVFYRFADFSHVTFPGTTAVTLSGDSSYTTLQRVAGISRTGMQINRHSLTTSYLDLMSHSGTSLTQSVARAMLRFVTVTAEALRFRQIQRGFRTTLDDLSGRSYVMTAEDVDLTLNWGRLSSVLPDYHGQDSVRVGRISFGSINAILGSVALILNCHHHASEFPKPSTPPGSSGGAPDIVMTQTPLSLPVTPGEPASISCRSSKSLLHSNGITYLYWYLQKPGQSPQLLIYQMSNLVSGVPDRFSGSGSGTDFTLKISRVEAEDVGVYYCAQNLELPYTFGGGTKVEIKGSTSGSGKPGSGEGSQVQLVQSGAEVKKPGSSVKVSCKASGYAFSYSWINWVRQAPGQGLEWMGRIFPGDGDTDYNGKFKGRVTITADKSTSTAYMELSSLRSEDTAVYYCARNVFDGYWLVYWGQGTLVTVSS

SEQ ID NO: 152 - protein, 510 aa, Artificial Sequence
  source: /note="Description of Artificial Sequence: Synthetic polypeptide"
  source: /note="Multivalent CD20-binding molecule component 106"
  MISC_FEATURE (242)..(242): /note="Cys residue at this position is available to form a homodimer or heterodimer via a disulfide bond with any of SEQ ID NOS 47-175"
KEFTLDFSTAKTYVDSLNVIRSAIGTPLQTISSGGTSLLMIDSGSGDNLFAVDVRGIDPEEGRFNNLRLIVERNNLYVTGFVNRTNNVFYRFADFSHVTFPGTTAVTLSGDSSYTTLQRVAGISRTGMQINRHSLTTSYLDLMSHSGTSLTQSVARAMLRFVTVTAEALRFRQIQRGFRTTLDDLSGRSYVMTAEDVDLTLNWGRLSSVLPDYHGQDSVRVGRISFGSINAILGSVALILNCHHHASRVAREFPKPSTPPGSSGGAPQIVLSQSPAILSASPGEKVTMTCRASSSVSYMHWYQQKPGSSPKPWIYAPSNLASGVPARFSGSGSGTSYSLTISRVEAEDAATYYCQQWSFNPPTFGAGTKLELKSGSTSGSGKPGSGEGSQAYLQQSGAELVRPGASVKMSCKASGYTFTSYNMHWVKQTPRQGLEWIGAIYPGNGDTSYNQKFKGKATLTVDKSSSTAYMQLSSLTSEDSAVYFCARVVYYSNSYWYFDVWGTGTTVTVS

SEQ ID NO: 153 - protein, 500 aa, Artificial Sequence
  source: /note="Description of Artificial Sequence: Synthetic polypeptide"
  source: /note="Multivalent CD20-binding molecule component 107"
  MISC_FEATURE (242)..(242): /note="Cys residue at this position is available to form a homodimer or heterodimer via a disulfide bond with any of SEQ ID NOS 47-175"
KEFTLDFSTAKTYVDSLNVIRSAIGTPLQTISSGGTSLLMIDSGSGDNLFAVDVRGIDPEEGRFNNLRLIVERNNLYVTGFVNRTNNVFYRFADFSHVTFPGTTAVTLSGDSSYTTLQRVAGISRTGMQINRHSLTTSYLDLMSHSGTSLTQSVARAMLRFVTVTAEALRFRQIQRGFRTTLDDLSGRSYVMTAEDVDLTLNWGRLSSVLPDYHGQDSVRVGRISFGSINAILGSVALILNCHHHASRVAREFPKPSTPPGSSGGAPQIVLSQSPAILSASPGEKVTMTCRASSSVSYMHWYQQKPGSSPKPWIYAPSNLASGVPARFSGSGSGTSYSLTISRVEAEDAATYYCQQWSFNPPTFGAGTKLELKSGGGGSQAYLQQSGAELVRPGASVKMSCKASGYTFTSYNMHWVKQTPRQGLEWIGAIYPGNGDTSYNQKFKGKATLTVDKSSSTAYMQLSSLTSEDSAVYFCARVVYYSNSYWYFDVWGTGTTVTVS

SEQ ID NO: 154 - protein, 510 aa, Artificial Sequence
  source: /note="Description of Artificial Sequence: Synthetic polypeptide"
  source: /note="Multivalent CD20-binding molecule component 108"
  MISC_FEATURE (242)..(242): /note="Cys residue at this position is available to form a homodimer or heterodimer via a disulfide bond with any of SEQ ID NOS 47-175"
KEFTLDFSTAKTYVDSLNVIRSAIGTPLQTISSGGTSLLMIDSGTGDNLFAVDVRGIDPEEGRFNNLRLIVERNNLYVTGFVNRTNNVFYRFADFSHVTFPGTTAVTLSGDSSYTTLQRVAGISRTGMQINRHSLTTSYLDLMSHSGTSLTQSVARAMLRFVTVTAEALRFRQIQRGFRTTLDDLSGRSYVMTAEDVDLTLNWGRLSSVLPDYHGQDSVRVGRISFGSINAILGSVALILNCHHHASRVAREFPKPSTPPGSSGGAPQIVLSQSPAILSASPGEKVTMTCRASSSVSYMHWYQQKPGSSPKPWIYAPSNLASGVPARFSGSGSGTSYSLTISRVEAEDAATYYCQQWSFNPPTFGAGTKLELKSGSTSGSGKPGSGEGSQAYLQQSGAELVRPGASVKMSCKASGYTFTSYNMHWVKQTPRQGLEWIGAIYPGNGDTSYNQKFKGKATLTVDKSSSTAYMQLSSLTSEDSAVYFCARVVYYSNSYWYFDVWGTGTTVTVS

SEQ ID NO: 155 - protein, 510 aa, Artificial Sequence
  source: /note="Description of Artificial Sequence: Synthetic polypeptide"
  source: /note="Multivalent CD20-binding molecule component 109"
  MISC_FEATURE (242)..(242): /note="Cys residue at this position is available to form a homodimer or heterodimer via a disulfide bond with any of SEQ ID NOS 47-175"
KEFTLDFSTAKTYVDSLNVIRSAIGTPLQTISSGGTSLLMIDSGSGDNLFAVDVRGIAPEEGRFNNLRLIVERNNLYVTGFVNRTNNVFYRFADFSHVTFPGTTAVTLSADSSYTTLQRVAGISRTGMQINRHSLTTSYLDLMSHSATSLTQSVARAMLRFVTVTAEALRFRQIQRGFRTTLDDLSGASYVMTAEDVDLTLNWGRLSSVLPDYHGQDSVRVGRISFGSINAILGSVALILNCHHHASRVAREFPKPSTPPGSSGGAPQIVLSQSPAILSASPGEKVTMTCRASSSVSYMHWYQQKPGSSPKPWIYAPSNLASGVPARFSGSGSGTSYSLTISRVEAEDAATYYCQQWSFNPPTFGAGTKLELKSGSTSGSGKPGSGEGSQAYLQQSGAELVRPGASVKMSCKASGYTFTSYNMHWVKQTPRQGLEWIGAIYPGNGDTSYNQKFKGKATLTVDKSSSTAYMQLSSLTSEDSAVYFCARVVYYSNSYWYFDVWGTGTTVTVS

SEQ ID NO: 156 - protein, 511 aa, Artificial Sequence
  source: /note="Description of Artificial Sequence: Synthetic polypeptide"
  source: /note="Multivalent CD20-binding molecule component 110"
  MISC_FEATURE (242)..(242): /note="Cys residue at this position is available to form a homodimer or heterodimer via a disulfide bond with any of SEQ ID NOS 47-175"
KEFTLDFSTAKTYVDSLNVIRSAIGTPLQTISSGGTSLLMIDNLVPMVATVVDVRGIDPEEGRFNNLRLIVERNNLYVTGFVNRTNNVFYRFADFSHVTFPGTTAVTLSGDSSYTTLQRVAGISRTGMQINRHSLTTSYLDLMSHSGTSLTQSVARAMLRFVTVTAEALRFRQIQRGFRTTLDDLSGRSYVMTAEDVDLTLNWGRLSSVLPDYHGQDSVRVGRISFGSINAILGSVALILNCHHHASRVARGGGGSGGQIVLSQSPAILSASPGEKVTMTCRASSSVSYMHWYQQKPGSSPKPWIYAPSNLASGVPARFSGSGSGTSYSLTISRVEAEDAATYYCQQWSFNPPTFGAGTKLELKSGGGGSGGGGSGGGGSGGGGSGGGGSQAYLQQSGAELVRPGASVKMSCKASGYTFTSYNMHWVKQTPRQGLEWIGAIYPGNGDTSYNQKFKGKATLTVDKSSSTAYMQLSSLTSEDSAVYFCARVVYYSNSYWYFDVWGTGTTVTVS

SEQ ID NO: 157 - protein, 510 aa, Artificial Sequence
  source: /note="Description of Artificial Sequence: Synthetic polypeptide"
  source: /note="Multivalent CD20-binding molecule component 111"
  MISC_FEATURE (242)..(242): /note="Cys residue at this position is available to form a homodimer or heterodimer via a disulfide bond with any of SEQ ID NOS 47-175"
KEFTLDFSTAKTYVDSLNVIRSAIGTPLQTISSGGTSLLMIDSGSGDNLFAVDVRGIDPEEGRFNNLRLIVERNNLYVTGFVNRTNNVFYRFADFSHVTFPGTTAVTLSGDSSYTTLQRVAGISRTGMQINRHSLTTSYLDLMSHSGTSLTQSVARAMLRFVTVTAEALRFRQIQRGFRTTLDDLSGRSYVMTAEDVDLTLNWGRLSSVLPDYHGQDSVRVGRISFGSINAILGSVALILNCHHHASAVAAEFPKPSTPPGSSGGAPQIVLSQSPAILSASPGEKVTMTCRASSSVSYMHWYQQKPGSSPKPWIYAPSNLASGVPARFSGSGSGTSYSLTISRVEAEDAATYYCQQWSFNPPTFGAGTKLELKSGSTSGSGKPGSGEGSQAYLQQSGAELVRPGASVKMSCKASGYTFTSYNMHWVKQTPRQGLEWIGAIYPGNGDTSYNQKFKGKATLTVDKSSSTAYMQLSSLTSEDSAVYFCARVVYYSNSYWYFDVWGTGTTVTVS

SEQ ID NO: 158 - protein, 511 aa, Artificial Sequence
  source: /note="Description of Artificial Sequence: Synthetic polypeptide"
  source: /note="Multivalent CD20-binding molecule component 112"
  MISC_FEATURE (242)..(242): /note="Cys residue at this position is available to form a homodimer or heterodimer via a disulfide bond with any of SEQ ID NOS 47-175"
KEFTLDFSTAKTYVDSLNVIRSAIGTPLQTISSGGTSLLMIDSGSGDNLFAVDVRGIDPEEGRFNNLRLIVERNNLYVTGFVNRTNNVFYRFADFSHVTFPGTTAVTLSGDSSYTTLQRVAGISRTGMQINRHSLTTSYLDLMSHSGTSLTQSVARAMLRFVTVTAEALRFRQIQRGFRTTLDDLSGRSYVMTAEDVDLTLNWGRLSSVLPDYHGQDSVRVGRISFGSINAILGSVALILNCHHHASRVAREFPKPSTPPGSSGGAPEIVLTQSPATLSLSPGERATLSCRASQSVSSYLAWYQQKPGQAPRLLIYDASNRATGIPARFSGSGSGTDFTLTISSLEPEDFAVYYCQQRSNWPITFGQGTRLEIKGSTSGSGKPGSGEGSEVQLVESGGGLVQPGRSLRLSCAASGFTFNDYAMHWVRQAPGKGLEWVSTISWNSGSIGYADSVKGRFTISRDNAKKSLYLQMNSLRAEDTALYYCAKDIQYGNYYYGMDVWGQGTTVTVSS

SEQ ID NO: 159 - protein, 512 aa, Artificial Sequence
  source: /note="Description of Artificial Sequence: Synthetic polypeptide"
  source: /note="Multivalent CD20-binding molecule component 113"
  MISC_FEATURE (242)..(242): /note="Cys residue at this position is available to form a homodimer or heterodimer via a disulfide bond with any of SEQ ID NOS 47-175"
KEFTLDFSTAKTYVDSLNVIRSAIGTPLQTISSGGTSLLMIDSGSGDNLFAVDVRGIDPEEGRFNNLRLIVERNNLYVTGFVNRTNNVFYRFADFSHVTFPGTTAVTLSGDSSYTTLQRVAGISRTGMQINRHSLTTSYLDLMSHSGTSLTQSVARAMLRFVTVTAEALRFRQIQRGFRTTLDDLSGRSYVMTAEDVDLTLNWGRLSSVLPDYHGQDSVRVGRISFGSINAILGSVALILNCHHHASRVARGGGGSGGEIVLTQSPATLSLSPGERATLSCRASQSVSSYLAWYQQKPGQAPRLLIYDASNRATGIPARFSGSGSGTDFTLTISSLEPEDFAVYYCQQRSNWPITFGQGTRLEIKGGGGSGGGGSGGGGSGGGGSGGGGSEVQLVESGGGLVQPGRSLRLSCAASGFTFNDYAMHWVRQAPGKGLEWVSTISWNSGSIGYADSVKGRFTISRDNAKKSLYLQMNSLRAEDTALYYCAKDIQYGNYYYGMDVWGQGTTVTVSS

SEQ ID NO: 160 - protein, 512 aa, Artificial Sequence
  source: /note="Description of Artificial Sequence: Synthetic polypeptide"
  source: /note="Multivalent CD20-binding molecule component 114"
  MISC_FEATURE (242)..(242): /note="Cys residue at this position is available to form a homodimer or heterodimer via a disulfide bond with any of SEQ ID NOS 47-175"
KEFTLDFSTAKTYVDSLNVIRSAIGTPLQTISSGGTSLLMIDSGTGDNLFAVDVRGIDPEEGRFNNLRLIVERNNLYVTGFVNRTNNVFYRFADFSHVTFPGTTAVTLSGDSSYTTLQRVAGISRTGMQINRHSLTTSYLDLMSHSGTSLTQSVARAMLRFVTVTAEALRFRQIQRGFRTTLDDLSGRSYVMTAEDVDLTLNWGRLSSVLPDYHGQDSVRVGRISFGSINAILGSVALILNCHHHASRVARGGGGSGGEIVLTQSPATLSLSPGERATLSCRASQSVSSYLAWYQQKPGQAPRLLIYDASNRATGIPARFSGSGSGTDFTLTISSLEPEDFAVYYCQQRSNWPITFGQGTRLEIKGGGGSGGGGSGGGGSGGGGSGGGGSEVQLVESGGGLVQPGRSLRLSCAASGFTFNDYAMHWVRQAPGKGLEWVSTISWNSGSIGYADSVKGRFTISRDNAKKSLYLQMNSLRAEDTALYYCAKDIQYGNYYYGMDVWGQGTTVTVSS

SEQ ID NO: 161 - protein, 498 aa, Artificial Sequence
  source: /note="Description of Artificial Sequence: Synthetic polypeptide"
  source: /note="Multivalent CD20-binding molecule component 115"
  MISC_FEATURE (242)..(242): /note="Cys residue at this position is available to form a homodimer or heterodimer via a disulfide bond with any of SEQ ID NOS 47-175"
KEFTLDFSTAKTYVDSLNVIRSAIGTPLQTISSGGTSLLMIDSGSGDNLFAVDVRGIAPEEGRFNNLRLIVERNNLYVTGFVNRTNNVFYRFADFSHVTFPGTTAVTLSADSSYTTLQRVAGISRTGMQINRHSLTTSYLDLMSHSATSLTQSVARAMLRFVTVTAEALRFRQIQRGFRTTLDDLSGASYVMTAEDVDLTLNWGRLSSVLPDYHGQDSVRVGRISFGSINAILGSVALILNCHHHASGGGGSGGEIVLTQSPATLSLSPGERATLSCRASQSVSSYLAWYQQKPGQAPRLLIYDASNRATGIPARFSGSGSGTDFTLTISSLEPEDFAVYYCQQRSNWPITFGQGTRLEIKGSTSGSGKPGSGEGSEVQLVESGGGLVQPGRSLRLSCAASGFTFNDYAMHWVRQAPGKGLEWVSTISWNSGSIGYADSVKGRFTISRDNAKKSLYLQMNSLRAEDTALYYCAKDIQYGNYYYGMDVWGQGTTVTVSS

SEQ ID NO: 162 - protein, 492 aa, Artificial Sequence
  source: /note="Description of Artificial Sequence: Synthetic polypeptide"
  source: /note="Multivalent CD20-binding molecule component 116"
  MISC_FEATURE (242)..(242): /note="Cys residue at this position is available to form a homodimer or heterodimer via a disulfide bond with any of SEQ ID NOS 47-175"
KEFTLDFSTAKTYVDSLNVIRSAIGTPLQTISSGGTSLLMIDNLVPMVATVVDVRGIDPEEGRFNNLRLIVERNNLYVTGFVNRTNNVFYRFADFSHVTFPGTTAVTLSGDSSYTTLQRVAGISRTGMQINRHSLTTSYLDLMSHSGTSLTQSVARAMLRFVTVTAEALRFRQIQRGFRTTLDDLSGRSYVMTAEDVDLTLNWGRLSSVLPDYHGQDSVRVGRISFGSINAILGSVALILNCHHHASRVARGGGGSGGEIVLTQSPATLSLSPGERATLSCRASQSVSSYLAWYQQKPGQAPRLLIYDASNRATGIPARFSGSGSGTDFTLTISSLEPEDFAVYYCQQRSNWPITFGQGTRLEIKGGGGSEVQLVESGGGLVQPGRSLRLSCAASGFTFNDYAMHWVRQAPGKGLEWVSTISWNSGSIGYADSVKGRFTISRDNAKKSLYLQMNSLRAEDTALYYCAKDIQYGNYYYGMDVWGQGTTVTVSS

SEQ ID NO: 163 - protein, 507 aa, Artificial Sequence
  source: /note="Description of Artificial Sequence: Synthetic polypeptide"
  source: /note="Multivalent CD20-binding molecule component 117"
  MISC_FEATURE (242)..(242): /note="Cys residue at this position is available to form a homodimer or heterodimer via a disulfide bond with any of SEQ ID NOS 47-175"
KEFTLDFSTAKTYVDSLNVIRSAIGTPLQTISSGGTSLLMIDSGSGDNLFAVDVRGIDPEEGRFNNLRLIVERNNLYVTGFVNRTNNVFYRFADFSHVTFPGTTAVTLSGDSSYTTLQRVAGISRTGMQINRHSLTTSYLDLMSHSGTSLTQSVARAMLRFVTVTAEALRFRQIQRGFRTTLDDLSGRSYVMTAEDVDLTLNWGRLSSVLPDYHGQDSVRVGRISFGSINAILGSVALILNCHHHASEFPKPSTPPGSSGGAPEIVLTQSPATLSLSPGERATLSCRASQSVSSYLAWYQQKPGQAPRLLIYDASNRATGIPARFSGSGSGTDFTLTISSLEPEDFAVYYCQQRSNWPITFGQGTRLEIKGSTSGSGKPGSGEGSEVQLVESGGGLVQPGRSLRLSCAASGFTFNDYAMHWVRQAPGKGLEWVSTISWNSGSIGYADSVKGRFTISRDNAKKSLYLQMNSLRAEDTALYYCAKDIQYGNYYYGMDVWGQGTTVTVSS

SEQ ID NO: 164 - protein, 512 aa, Artificial Sequence
  source: /note="Description of Artificial Sequence: Synthetic polypeptide"
  source: /note="Multivalent CD20-binding molecule component 118"
  MISC_FEATURE (242)..(242): /note="Cys residue at this position is available to form a homodimer or heterodimer via a disulfide bond with any of SEQ ID NOS 47-175"
KEFTLDFSTAKTYVDSLNVIRSAIGTPLQTISSGGTSLLMIDSGSGDNLFAVDVRGIDPEEGRFNNLRLIVERNNLYVTGFVNRTNNVFYRFADFSHVTFPGTTAVTLSGDSSYTTLQRVAGISRTGMQINRHSLTTSYLDLMSHSGTSLTQSVARAMLRFVTVTAEALRFRQIQRGFRTTLDDLSGRSYVMTAEDVDLTLNWGRLSSVLPDYHGQDSVRVGRISFGSINAILGSVALILNCHHHASRVAREFPKPSTPPGSSGGAPQVQLQQPGAELVKPGASVKMSCKASGYTFTSYNMHWVKQTPGRGLEWIGAIYPGNGDTSYNQKFKGKATLTADKSSSTAYMQLSSLTSEDSAVYYCARSTYYGGDWYFNVWGAGTTVTVSAGSTSGSGKPGSGEGSTKGQIVLSQSPAILSASPGEKVTMTCRASSSVSYIHWFQQKPGSSPKPWIYATSNLASGVPVRFSGSGSGTSYSLTISRVEAEDAATYYCQQWTSNPPTFGGGTKLEIK

SEQ ID NO: 165 - protein, 503 aa, Artificial Sequence
  source: /note="Description of Artificial Sequence: Synthetic polypeptide"
  source: /note="Multivalent CD20-binding molecule component 119"
  MISC_FEATURE (242)..(242): /note="Cys residue at this position is available to form a homodimer or heterodimer via a disulfide bond with any of SEQ ID NOS 47-175"
KEFTLDFSTAKTYVDSLNVIRSAIGTPLQTISSGGTSLLMIDSGSGDNLFAVDVRGIDPEEGRFNNLRLIVERNNLYVTGFVNRTNNVFYRFADFSHVTFPGTTAVTLSGDSSYTTLQRVAGISRTGMQINRHSLTTSYLDLMSHSGTSLTQSVARAMLRFVTVTAEALRFRQIQRGFRTTLDDLSGRSYVMTAEDVDLTLNWGRLSSVLPDYHGQDSVRVGRISFGSINAILGSVALILNCHHHASRVARGGGGSGGQVQLQQPGAELVKPGASVKMSCKASGYTFTSYNMHWVKQTPGRGLEWIGAIYPGNGDTSYNQKFKGKATLTADKSSSTAYMQLSSLTSEDSAVYYCARSTYYGGDWYFNVWGAGTTVTVSAGSTSGSGKPGSGEGSTKGQIVLSQSPAILSASPGEKVTMTCRASSSVSYIHWFQQKPGSSPKPWIYATSNLASGVPVRFSGSGSGTSYSLTISRVEAEDAATYYCQQWTSNPPTFGGGTKLEIK

SEQ ID NO: 166 - protein, 503 aa, Artificial Sequence
  source: /note="Description of Artificial Sequence: Synthetic polypeptide"
  source: /note="Multivalent CD20-binding molecule component 120"
  MISC_FEATURE (242)..(242): /note="Cys residue at this position is available to form a homodimer or heterodimer via a disulfide bond with any of SEQ ID NOS 47-175"
KEFTLDFSTAKTYVDSLNVIRSAIGTPLQTISSGGTSLLMIDSGTGDNLFAVDVRGIDPEEGRFNNLRLIVERNNLYVTGFVNRTNNVFYRFADFSHVTFPGTTAVTLSGDSSYTTLQRVAGISRTGMQINRHSLTTSYLDLMSHSGTSLTQSVARAMLRFVTVTAEALRFRQIQRGFRTTLDDLSGRSYVMTAEDVDLTLNWGRLSSVLPDYHGQDSVRVGRISFGSINAILGSVALILNCHHHASRVARGGGGSGGQVQLQQPGAELVKPGASVKMSCKASGYTFTSYNMHWVKQTPGRGLEWIGAIYPGNGDTSYNQKFKGKATLTADKSSSTAYMQLSSLTSEDSAVYYCARSTYYGGDWYFNVWGAGTTVTVSAGSTSGSGKPGSGEGSTKGQIVLSQSPAILSASPGEKVTMTCRASSSVSYIHWFQQKPGSSPKPWIYATSNLASGVPVRFSGSGSGTSYSLTISRVEAEDAATYYCQQWTSNPPTFGGGTKLEIK

SEQ ID NO: 167 - protein, 493 aa, Artificial Sequence
  source: /note="Description of Artificial Sequence: Synthetic polypeptide"
  source: /note="Multivalent CD20-binding molecule component 121"
  MISC_FEATURE (242)..(242): /note="Cys residue at this position is available to form a homodimer or heterodimer via a disulfide bond with any of SEQ ID NOS 47-175"
KEFTLDFSTAKTYVDSLNVIRSAIGTPLQTISSGGTSLLMIDSGSGDNLFAVDVRGIAPEEGRFNNLRLIVERNNLYVTGFVNRTNNVFYRFADFSHVTFPGTTAVTLSADSSYTTLQRVAGISRTGMQINRHSLTTSYLDLMSHSATSLTQSVARAMLRFVTVTAEALRFRQIQRGFRTTLDDLSGASYVMTAEDVDLTLNWGRLSSVLPDYHGQDSVRVGRISFGSINAILGSVALILNCHHHASRVARGGGGSGGQVQLQQPGAELVKPGASVKMSCKASGYTFTSYNMHWVKQTPGRGLEWIGAIYPGNGDTSYNQKFKGKATLTADKSSSTAYMQLSSLTSEDSAVYYCARSTYYGGDWYFNVWGAGTTVTVSAGGGGSTKGQIVLSQSPAILSASPGEKVTMTCRASSSVSYIHWFQQKPGSSPKPWIYATSNLASGVPVRFSGSGSGTSYSLTISRVEAEDAATYYCQQWTSNPPTFGGGTKLEIK

SEQ ID NO: 168 - protein, 525 aa, Artificial Sequence
  source: /note="Description of Artificial Sequence: Synthetic polypeptide"
  source: /note="Multivalent CD20-binding molecule component 122"
  MISC_FEATURE (242)..(242): /note="Cys residue at this position is available to form a homodimer or heterodimer via a disulfide bond with any of SEQ ID NOS 47-175"
KEFTLDFSTAKTYVDSLNVIRSAIGTPLQTISSGGTSLLMIDNLVPMVATVVDVRGIDPEEGRFNNLRLIVERNNLYVTGFVNRTNNVFYRFADFSHVTFPGTTAVTLSGDSSYTTLQRVAGISRTGMQINRHSLTTSYLDLMSHSGTSLTQSVARAMLRFVTVTAEALRFRQIQRGFRTTLDDLSGRSYVMTAEDVDLTLNWGRLSSVLPDYHGQDSVRVGRISFGSINAILGSVALILNCHHHASRVAREFPKPSTPPGSSGGAPQVQLQQPGAELVKPGASVKMSCKASGYTFTSYNMHWVKQTPGRGLEWIGAIYPGNGDTSYNQKFKGKATLTADKSSSTAYMQLSSLTSEDSAVYYCARSTYYGGDWYFNVWGAGTTVTVSAGGGGSGGGGSGGGGSGGGGSGGGGSTKGQIVLSQSPAILSASPGEKVTMTCRASSSVSYIHWFQQKPGSSPKPWIYATSNLASGVPVRFSGSGSGTSYSLTISRVEAEDAATYYCQQWTSNPPTFGGGTKLEIKDEL

SEQ ID NO: 169 - protein, 493 aa, Artificial Sequence
  source: /note="Description of Artificial Sequence: Synthetic polypeptide"
  source: /note="Multivalent CD20-binding molecule component 123"
  MISC_FEATURE (242)..(242): /note="Cys residue at this position is available to form a homodimer or heterodimer via a disulfide bond with any of SEQ ID NOS 47-175"
KEFTLDFSTAKTYVDSLNVIRSAIGTPLQTISSGGTSLLMIDSGSGDNLFAVDVRGIDPEEGRFNNLRLIVERNNLYVTGFVNRTNNVFYRFADFSHVTFPGTTAVTLSGDSSYTTLQRVAGISRTGMQINRHSLTTSYLDLMSHSGTSLTQSVARAMLRFVTVTAEALRFRQIQRGFRTTLDDLSGRSYVMTAEDVDLTLNWGRLSSVLPDYHGQDSVRVGRISFGSINAILGSVALILNCHHHASAVAAGGGGSGGQVQLQQPGAELVKPGASVKMSCKASGYTFTSYNMHWVKQTPGRGLEWIGAIYPGNGDTSYNQKFKGKATLTADKSSSTAYMQLSSLTSEDSAVYYCARSTYYGGDWYFNVWGAGTTVTVSAGGGGSTKGQIVLSQSPAILSASPGEKVTMTCRASSSVSYIHWFQQKPGSSPKPWIYATSNLASGVPVRFSGSGSGTSYSLTISRVEAEDAATYYCQQWTSNPPTFGGGTKLEIK

SEQ ID NO: 170 - protein, 509 aa, Artificial Sequence
  source: /note="Description of Artificial Sequence: Synthetic polypeptide"
  source: /note="Multivalent CD20-binding molecule component 124"
  MISC_FEATURE (242)..(242): /note="Cys residue at this position is available to form a homodimer or heterodimer via a disulfide bond with any of SEQ ID NOS 47-175"
KEFTLDFSTAKTYVDSLNVIRSAIGTPLQTISSGGTSLLMIDSGSGDNLFAVDVRGIDPEEGRFNNLRLIVERNNLYVTGFVNRTNNVFYRFADFSHVTFPGTTAVTLSGDSSYTTLQRVAGISRTGMQINRHSLTTSYLDLMSHSGTSLTQSVARAMLRFVTVTAEALRFRQIQRGFRTTLDDLSGRSYVMTAEDVDLTLNWGRLSSVLPDYHGQDSVRVGRISFGSINAILGSVALILNCHHHASRVAREFPKPSTPPGSSGGAPQVQLVQSGAELVKPGASVKMSCKASGYTFTSYNMHWVKQTPGQGLEWIGAIYPGNGDTSYNQKFKGKATLTADKSSSTAYMQLSSLTSEDSAVYYCARAQLRPNYWYFDVWGAGTTVTVSSGSTSGSGKPGSGEGSDIVLSQSPAILSASPGEKVTMTCRASSSVSYMHWYQQKPGSSPKPWIYATSNLASGVPARFSGSGSGTSYSLTISRVEAEDAATYYCQQWISNPPTFGAGTKLELK

SEQ ID NO: 171 - protein, 499 aa, Artificial Sequence
  source: /note="Description of Artificial Sequence: Synthetic polypeptide"
  source: /note="Multivalent CD20-binding molecule component 125"
  MISC_FEATURE (242)..(242): /note="Cys residue at this position is available to form a homodimer or heterodimer via a disulfide bond with any of SEQ ID NOS 47-175"
KEFTLDFSTAKTYVDSLNVIRSAIGTPLQTISSGGTSLLMIDNLVPMVATVVDVRGIDPEEGRFNNLRLIVERNNLYVTGFVNRTNNVFYRFADFSHVTFPGTTAVTLSGDSSYTTLQRVAGISRTGMQINRHSLTTSYLDLMSHSGTSLTQSVARAMLRFVTVTAEALRFRQIQRGFRTTLDDLSGRSYVMTAEDVDLTLNWGRLSSVLPDYHGQDSVRVGRISFGSINAILGSVALILNCHHHASRVAREFPKPSTPPGSSGGAPQVQLVQSGAELVKPGASVKMSCKASGYTFTSYNMHWVKQTPGQGLEWIGAIYPGNGDTSYNQKFKGKATLTADKSSSTAYMQLSSLTSEDSAVYYCARAQLRPNYWYFDVWGAGTTVTVSSGGGGSDIVLSQSPAILSASPGEKVTMTCRASSSVSYMHWYQQKPGSSPKPWIYATSNLASGVPARFSGSGSGTSYSLTISRVEAEDAATYYCQQWISNPPTFGAGTKLELK

SEQ ID NO: 172 - protein, 496 aa, Artificial Sequence
  source: /note="Description of Artificial Sequence: Synthetic polypeptide"
  source: /note="Multivalent CD20-binding molecule component 126"
  MISC_FEATURE (242)..(242): /note="Cys residue at this position is available to form a homodimer or heterodimer via a disulfide bond with any of SEQ ID NOS 47-175"
KEFTLDFSTAKTYVDSLNVIRSAIGTPLQTISSGGTSLLMIDSGSGDNLFAVDVRGIDPEEGRFNNLRLIVERNNLYVTGFVNRTNNVFYRFADFSHVTFPGTTAVTLSGDSSYTTLQRVAGISRTGMQINRHSLTTSYLDLMSHSGTSLTQSVARAMLRFVTVTAEALRFRQIQRGFRTTLDDLSGRSYVMTAEDVDLTLNWGRLSSVLPDYHGQDSVRVGRISFGSINAILGSVALILNCHHHASGGGGSGGQVQLVQSGAELVKPGASVKMSCKASGYTFTSYNMHWVKQTPGQGLEWIGAIYPGNGDTSYNQKFKGKATLTADKSSSTAYMQLSSLTSEDSAVYYCARAQLRPNYWYFDVWGAGTTVTVSSGSTSGSGKPGSGEGSDIVLSQSPAILSASPGEKVTMTCRASSSVSYMHWYQQKPGSSPKPWIYATSNLASGVPARFSGSGSGTSYSLTISRVEAEDAATYYCQQWISNPPTFGAGTKLELK

SEQ ID NO: 173 - protein, 512 aa, Artificial Sequence; identical to SEQ ID NO: 164
  source: /note="Description of Artificial Sequence: Synthetic polypeptide"
  source: /note="Multivalent CD20-binding molecule component 127"
  MISC_FEATURE (242)..(242): /note="Cys residue at this position is available to form a homodimer or heterodimer via a disulfide bond with any of SEQ ID NOS 47-175"

SEQ ID NO: 174 - protein, 502 aa, Artificial Sequence
  source: /note="Description of Artificial Sequence: Synthetic polypeptide"
  source: /note="Multivalent CD20-binding molecule component 128"
  MISC_FEATURE (242)..(242): /note="Cys residue at this position is available to form a homodimer or heterodimer via a disulfide bond with any of SEQ ID NOS 47-175"
KEFTLDFSTAKTYVDSLNVIRSAIGTPLQTISSGGTSLLMIDNLVPMVATVVDVRGIDPEEGRFNNLRLIVERNNLYVTGFVNRTNNVFYRFADFSHVTFPGTTAVTLSGDSSYTTLQRVAGISRTGMQINRHSLTTSYLDLMSHSGTSLTQSVARAMLRFVTVTAEALRFRQIQRGFRTTLDDLSGRSYVMTAEDVDLTLNWGRLSSVLPDYHGQDSVRVGRISFGSINAILGSVALILNCHHHASRVAREFPKPSTPPGSSGGAPQVQLQQPGAELVKPGASVKMSCKASGYTFTSYNMHWVKQTPGRGLEWIGAIYPGNGDTSYNQKFKGKATLTADKSSSTAYMQLSSLTSEDSAVYYCARSTYYGGDWYFNVWGAGTTVTVSAGGGGSTKGQIVLSQSPAILSASPGEKVTMTCRASSSVSYIHWFQQKPGSSPKPWIYATSNLASGVPVRFSGSGSGTSYSLTISRVEAEDAATYYCQQWTSNPPTFGGGTKLEIK

SEQ ID NO: 175 - protein, 488 aa, Artificial Sequence
  source: /note="Description of Artificial Sequence: Synthetic polypeptide"
  source: /note="Multivalent CD20-binding molecule component 129"
  MISC_FEATURE (242)..(242): /note="Cys residue at this position is available to form a homodimer or heterodimer via a disulfide bond with any of SEQ ID NOS 47-175"
KEFTLDFSTAKTYVDSLNVIRSAIGTPLQTISSGGTSLLMIDSGSGDNLFAVDVRGIDPEEGRFNNLRLIVERNNLYVTGFVNRTNNVFYRFADFSHVTFPGTTAVTLSGDSSYTTLQRVAGISRTGMQINRHSLTTSYLDLMSHSGTSLTQSVARAMLRFVTVTAEALRFRQIQRGFRTTLDDLSGRSYVMTAEDVDLTLNWGRLSSVLPDYHGQDSVRVGRISFGSINAILGSVALILNCHHHASAVAAGGGGSGGQVQLQQPGAELVKPGASVKMSCKASGYTFTSYNMHWVKQTPGRGLEWIGAIYPGNGDTSYNQKFKGKATLTADKSSSTAYMQLSSLTSEDSAVYYCARSTYYGGDWYFNVWGAGTTVTVSAGGGGSGGGGSGGGGSGGGGSGGGGSTKGQIVLSQSPAILSASPGEKVTMTCRASSSVSYIHWFQQKPGSSPKPWIYATSNLASGVPVRFSGSGSGTSYSLTISRVEAED

SEQ ID NO: 176 - protein, 519 aa, Artificial Sequence
  source: /note="Description of Artificial Sequence: Synthetic polypeptide"
  source: /note="Multivalent CD20-binding molecule component 130"
QVQLVQSGAELVKPGASVKMSCKASGYTFTSYNMHWVKQTPGQGLEWIGAIYPGNGDTSYNQKFKGKATLTADKSSSTAYMQLSSLTSEDSAVYYCARAQLRPNYWYFDVWGAGTTVTVSSGGGGSGGGGSGGGGSGGGGSGGGGSDIVLSQSPAILSASPGEKVTMTCRASSSVSYMHWYQQKPGSSPKPWIYATSNLASGVPARFSGSGSGTSYSLTISRVEAEDAATYYCQQWISNPPTFGAGTKLELKEFPKPSTPPGSSGGAPKEFTLDFSTAKTYVDSLNVIRSAIGTPLQTISSGGTSLLMIDSGSGDNLFAVDVRGIDPEEGRFNNLRLIVERNNLYVTGFVNRTNNVFYRFADFSHVTFPGTTAVTLSGDSSYTTLQRVAGISRTGMQINRHSLTTSYLDLMSHSGTSLTQSVARAMLRFVTVTAEALRFRQIQRGFRTTLDDLSGRSYVMTAEDVDLTLNWGRLSSVLPDYHGQDSVRVGRISFGSINAILGSVALILNSHHHASRVAR

SEQ ID NO: 177 - protein, 509 aa, Artificial Sequence
  source: /note="Description of Artificial Sequence: Synthetic polypeptide"
  source: /note="Multivalent CD20-binding molecule component 131"
QVQLVQSGAELVKPGASVKMSCKASGYTFTSYNMHWVKQTPGQGLEWIGAIYPGNGDTSYNQKFKGKATLTADKSSSTAYMQLSSLTSEDSAVYYCARAQLRPNYWYFDVWGAGTTVTVSSGSTSGSGKPGSGEGSDIVLSQSPAILSASPGEKVTMTCRASSSVSYMHWYQQKPGSSPKPWIYATSNLASGVPARFSGSGSGTSYSLTISRVEAEDAATYYCQQWISNPPTFGAGTKLELKEFPKPSTPPGSSGGAPKEFTLDFSTAKTYVDSLNVIRSAIGTPLQTISSGGTSLLMIDSGSGDNLFAVDVRGIDPEEGRFNNLRLIVERNNLYVTGFVNRTNNVFYRFADFSHVTFPGTTAVTLSGDSSYTTLQRVAGISRTGMQINRHSLTTSYLDLMSHSGTSLTQSVARAMLRFVTVTAEALRFRQIQRGFRTTLDDLSGRSYVMTAEDVDLTLNWGRLSSVLPDYHGQDSVRVGRISFGSINAILGSVALILNSHHHASRVAR

SEQ ID NO: 178 - protein, 499 aa, Artificial Sequence
  source: /note="Description of Artificial Sequence: Synthetic polypeptide"
  source: /note="Multivalent CD20-binding molecule component 132"
QVQLVQSGAELVKPGASVKMSCKASGYTFTSYNMHWVKQTPGQGLEWIGAIYPGNGDTSYNQKFKGKATLTADKSSSTAYMQLSSLTSEDSAVYYCARAQLRPNYWYFDVWGAGTTVTVSSGGGGSDIVLSQSPAILSASPGEKVTMTCRASSSVSYMHWYQQKPGSSPKPWIYATSNLASGVPARFSGSGSGTSYSLTISRVEAEDAATYYCQQWISNPPTFGAGTKLELKEFPKPSTPPGSSGGAPKEFTLDFSTAKTYVDSLNVIRSAIGTPLQTISSGGTSLLMIDSGTGDNLFAVDVRGIAPEEGRFNNLRLIVERNNLYVTGFVNRTNNVFYRFADFSHVTFPGTTAVTLSADSSYTTLQRVAGISRTGMQINRHSLTTSYLDLMSHSATSLTQSVARAMLRFVTVTAEALRFRQIQRGFRTTLDDLSGASYVMTAEDVDLTLNWGRLSSVLPDYHGQDSVRVGRISFGSINAILGSVALILNSHHHASRVAR

SEQ ID NO: 179 - protein, 514 aa, Artificial Sequence
  source: /note="Description of Artificial Sequence: Synthetic polypeptide"
  source: /note="Multivalent CD20-binding molecule component 133"
QVQLVQSGAELVKPGASVKMSCKASGYTFTSYNMHWVKQTPGQGLEWIGAIYPGNGDTSYNQKFKGKATLTADKSSSTAYMQLSSLTSEDSAVYYCARAQLRPNYWYFDVWGAGTTVTVSSGGGGSGGGGSGGGGSGGGGSGGGGSDIVLSQSPAILSASPGEKVTMTCRASSSVSYMHWYQQKPGSSPKPWIYATSNLASGVPARFSGSGSGTSYSLTISRVEAEDAATYYCQQWISNPPTFGAGTKLELKGGGGSGGKEFTLDFSTAKTYVDSLNVIRSAIGTPLQTISSGGTSLLMIDSGSGDNLFAVDVRGIAPEEGRFNNLRLIVERNNLYVTGFVNRTNNVFYRFADFSHVTFPGTTAVTLSADSSYTTLQRVAGISRTGMQINRHSLTTSYLDLMSHSATSLTQSVARAMLRFVTVTAEALRFRQIQRGFRTTLDDLSGASYVMTAEDVDLTLNWGRLSSVLPDYHGQDSVRVGRISFGSINAILGSVALILNSHHHASRVARKDEL

SEQ ID NO: 180 - protein, 500 aa, Artificial Sequence
  source: /note="Description of Artificial Sequence: Synthetic polypeptide"
  source: /note="Multivalent CD20-binding molecule component 134"
QVQLVQSGAELVKPGASVKMSCKASGYTFTSYNMHWVKQTPGQGLEWIGAIYPGNGDTSYNQKFKGKATLTADKSSSTAYMQLSSLTSEDSAVYYCARAQLRPNYWYFDVWGAGTTVTVSSGSTSGSGKPGSGEGSDIVLSQSPAILSASPGEKVTMTCRASSSVSYMHWYQQKPGSSPKPWIYATSNLASGVPARFSGSGSGTSYSLTISRVEAEDAATYYCQQWISNPPTFGAGTKLELKGGGGSGGKEFTLDFSTAKTYVDSLNVIRSAIGTPLQTISSGGTSLLMIDNLVPMVATVVDVRGIDPEEGRFNNLRLIVERNNLYVTGFVNRTNNVFYRFADFSHVTFPGTTAVTLSGDSSYTTLQRVAGISRTGMQINRHSLTTSYLDLMSHSGTSLTQSVARAMLRFVTVTAEALRFRQIQRGFRTTLDDLSGRSYVMTAEDVDLTLNWGRLSSVLPDYHGQDSVRVGRISFGSINAILGSVALILNSHHHASRVAR

SEQ ID NO: 181 - protein, 508 aa, Artificial Sequence
  source: /note="Description of Artificial Sequence: Synthetic polypeptide"
  source: /note="Multivalent CD20-binding molecule component 135"
QVQLVQSGAELVKPGASVKMSCKASGYTFTSYNMHWVKQTPGQGLEWIGAIYPGNGDTSYNQKFKGKATLTADKSSSTAYMQLSSLTSEDSAVYYCARAQLRPNYWYFDVWGAGTTVTVSSGGGGSDIVLSQSPAILSASPGEKVTMTCRASSSVSYMHWYQQKPGSSPKPWIYATSNLASGVPARFSGSGSGTSYSLTISRVEAEDAATYYCQQWISNPPTFGAGTKLELKEFPKPSTPPGSSGGAPGILGFVFTLKEFTLDFSTAKTYVDSLNVIRSAIGTPLQTISSGGTSLLMIDSGSGDNLFAVDVRGIDPEEGRFNNLRLIVERNNLYVTGFVNRTNNVFYRFADFSHVTFPGTTAVTLSGDSSYTTLQRVAGISRTGMQINRHSLTTSYLDLMSHSGTSLTQSVARAMLRFVTVTAEALRFRQIQRGFRTTLDDLSGRSYVMTAEDVDLTLNWGRLSSVLPDYHGQDSVRVGRISFGSINAILGSVALILNSHHHASAVAA

SEQ ID NO: 182 - protein, 521 aa, Artificial Sequence
  source: /note="Description of Artificial Sequence: Synthetic polypeptide"
  source: /note="Multivalent CD20-binding molecule component 136"
QVQLQQPGAELVKPGASVKMSCKTSGYTFTSYNVHWVKQTPGQGLEWIGAIYPGNGDTSFNQKFKGKATLTADKSSSTVYMQLSSLTSEDSAVYYCARSNYYGSSYVWFFDVWGAGTTVTVSSGGGGSGGGGSGGGGSGGGGSGGGGSQIVLSQSPTILSASPGEKVTMTCRASSSVSYMDWYQQKPGSSPKPWIYATSNLASGVPARFSGSGSGTSYSLTISRVEAEDAATYYCQQWISNPPTFGAGTKLELKEFPKPSTPPGSSGGAPKEFTLDFSTAKTYVDSLNVIRSAIGTPLQTISSGGTSLLMIDSGSGDNLFAVDVRGIDPEEGRFNNLRLIVERNNLYVTGFVNRTNNVFYRFADFSHVTFPGTTAVTLSGDSSYTTLQRVAGISRTGMQINRHSLTTSYLDLMSHSGTSLTQSVARAMLRFVTVTAEALRFRQIQRGFRTTLDDLSGRSYVMTAEDVDLTLNWGRLSSVLPDYHGQDSVRVGRISFGSINAILGSVALILNSHHHASRVAR

SEQ ID NO: 183 - protein, 512 aa, Artificial Sequence
  source: /note="Description of Artificial Sequence: Synthetic polypeptide"
  source: /note="Multivalent CD20-binding molecule component 137"
MQVQLQQPGAELVKPGASVKMSCKTSGYTFTSYNVHWVKQTPGQGLEWIGAIYPGNGDTSFNQKFKGKATLTADKSSSTVYMQLSSLTSEDSAVYYCARSNYYGSSYVWFFDVWGAGTTVTVSSGSTSGSGKPGSGEGSQIVLSQSPTILSASPGEKVTMTCRASSSVSYMDWYQQKPGSSPKPWIYATSNLASGVPARFSGSGSGTSYSLTISRVEAEDAATYYCQQWISNPPTFGAGTKLELKEFPKPSTPPGSSGGAPKEFTLDFSTAKTYVDSLNVIRSAIGTPLQTISSGGTSLLMIDSGSGDNLFAVDVRGIDPEEGRFNNLRLIVERNNLYVTGFVNRTNNVFYRFADFSHVTFPGTTAVTLSGDSSYTTLQRVAGISRTGMQINRHSLTTSYLDLMSHSGTSLTQSVARAMLRFVTVTAEALRFRQIQRGFRTTLDDLSGRSYVMTAEDVDLTLNWGRLSSVLPDYHGQDSVRVGRISFGSINAILGSVALILNSHHHASRVAR

SEQ ID NO: 184 - protein, 511 aa, Artificial Sequence
  source: /note="Description of Artificial Sequence: Synthetic polypeptide"
  source: /note="Multivalent CD20-binding molecule component 138"
QVQLQQPGAELVKPGASVKMSCKTSGYTFTSYNVHWVKQTPGQGLEWIGAIYPGNGDTSFNQKFKGKATLTADKSSSTVYMQLSSLTSEDSAVYYCARSNYYGSSYVWFFDVWGAGTTVTVSSGSTSGSGKPGSGEGSQIVLSQSPTILSASPGEKVTMTCRASSSVSYMDWYQQKPGSSPKPWIYATSNLASGVPARFSGSGSGTSYSLTISRVEAEDAATYYCQQWISNPPTFGAGTKLELKEFPKPSTPPGSSGGAPKEFTLDFSTAKTYVDSLNVIRSAIGTPLQTISSGGTSLLMIDSGSGDNLFAVDVRGIDPEEGRFNNLRLIVERNNLYVTGFVNRTNNVFYRFADFSHVTFPGTTAVTLSGDSSYTTLQRVAGISRTGMQINRHSLTTSYLDLMSHSGTSLTQSVARAMLRFVTVTAEALRFRQIQRGFRTTLDDLSGRSYVMTAEDVDLTLNWGRLSSVLPDYHGQDSVRVGRISFGSINAILGSVALILNSHHHASRVAR

SEQ ID NO: 185 - protein, 501 aa, Artificial Sequence
  source: /note="Description of Artificial Sequence: Synthetic polypeptide"
  source: /note="Multivalent CD20-binding molecule component 139"
QVQLQQPGAELVKPGASVKMSCKTSGYTFTSYNVHWVKQTPGQGLEWIGAIYPGNGDTSFNQKFKGKATLTADKSSSTVYMQLSSLTSEDSAVYYCARSNYYGSSYVWFFDVWGAGTTVTVSSGGGGSQIVLSQSPTILSASPGEKVTMTCRASSSVSYMDWYQQKPGSSPKPWIYATSNLASGVPARFSGSGSGTSYSLTISRVEAEDAATYYCQQWISNPPTFGAGTKLELKEFPKPSTPPGSSGGAPKEFTLDFSTAKTYVDSLNVIRSAIGTPLQTISSGGTSLLMIDSGSGDNLFAVDVRGIDPEEGRFNNLRLIVERNNLYVTGFVNRTNNVFYRFADFSHVTFPGTTAVTLSGDSSYTTLQRVAGISRTGMQINRHSLTTSYLDLMSHSGTSLTQSVARAMLRFVTVTAEALRFRQIQRGFRTTLDDLSGRSYVMTAEDVDLTLNWGRLSSVLPDYHGQDSVRVGRISFGSINAILGSVALILNSHHHASRVAR

SEQ ID NO: 186 - protein, 512 aa, Artificial Sequence
  source: /note="Description of Artificial Sequence: Synthetic polypeptide"
  source: /note="Multivalent CD20-binding molecule component 140"
QVQLQQPGAELVKPGASVKMSCKTSGYTFTSYNVHWVKQTPGQGLEWIGAIYPGNGDTSFNQKFKGKATLTADKSSSTVYMQLSSLTSEDSAVYYCARSNYYGSSYVWFFDVWGAGTTVTVSSGGGGSGGGGSGGGGSGGGGSGGGGSQIVLSQSPTILSASPGEKVTMTCRASSSVSYMDWYQQKPGSSPKPWIYATSNLASGVPARFSGSGSGTSYSLTISRVEAEDAATYYCQQWISNPPTFGAGTKLELKGGGGSGGKEFTLDFSTAKTYVDSLNVIRSAIGTPLQTISSGGTSLLMIDSGSGDNLFAVDVRGIDPEEGRFNNLRLIVERNNLYVTGFVNRTNNVFYRFADFSHVTFPGTTAVTLSGDSSYTTLQRVAGISRTGMQINRHSLTTSYLDLMSHSGTSLTQSVARAMLRFVTVTAEALRFRQIQRGFRTTLDDLSGRSYVMTAEDVDLTLNWGRLSSVLPDYHGQDSVRVGRISFGSINAILGSVALILNSHHHASRVAR

SEQ ID NO: 187 - protein, 502 aa, Artificial Sequence
  source: /note="Description of Artificial Sequence: Synthetic polypeptide"
  source: /note="Multivalent CD20-binding molecule component 141"
QVQLQQPGAELVKPGASVKMSCKTSGYTFTSYNVHWVKQTPGQGLEWIGAIYPGNGDTSFNQKFKGKATLTADKSSSTVYMQLSSLTSEDSAVYYCARSNYYGSSYVWFFDVWGAGTTVTVSSGSTSGSGKPGSGEGSQIVLSQSPTILSASPGEKVTMTCRASSSVSYMDWYQQKPGSSPKPWIYATSNLASGVPARFSGSGSGTSYSLTISRVEAEDAATYYCQQWISNPPTFGAGTKLELKGGGGSGGKEFTLDFSTAKTYVDSLNVIRSAIGTPLQTISSGGTSLLMIDSGSGDNLFAVDVRGIDPEEGRFNNLRLIVERNNLYVTGFVNRTNNVFYRFADFSHVTFPGTTAVTLSGDSSYTTLQRVAGISRTGMQINRHSLTTSYLDLMSHSGTSLTQSVARAMLRFVTVTAEALRFRQIQRGFRTTLDDLSGRSYVMTAEDVDLTLNWGRLSSVLPDYHGQDSVRVGRISFGSINAILGSVALILNSHHHASRVAR

SEQ ID NO: 188 - protein, 530 aa, Artificial Sequence
  source: /note="Description of Artificial Sequence: Synthetic polypeptide"
  source: /note="Multivalent CD20-binding molecule component 142"
QVQLQQPGAELVKPGASVKMSCKTSGYTFTSYNVHWVKQTPGQGLEWIGAIYPGNGDTSFNQKFKGKATLTADKSSSTVYMQLSSLTSEDSAVYYCARSNYYGSSYVWFFDVWGAGTTVTVSSGGGGSGGGGSGGGGSGGGGSGGGGSQIVLSQSPTILSASPGEKVTMTCRASSSVSYMDWYQQKPGSSPKPWIYATSNLASGVPARFSGSGSGTSYSLTISRVEAEDAATYYCQQWISNPPTFGAGTKLELKEFPKPSTPPGSSGGAPGILGFVFTLKEFTLDFSTAKTYVDSLNVIRSAIGTPLQTISSGGTSLLMIDSGSGDNLFAVDVRGIDPEEGRFNNLRLIVERNNLYVTGFVNRTNNVFYRFADFSHVTFPGTTAVTLSGDSSYTTLQRVAGISRTGMQINRHSLTTSYLDLMSHSGTSLTQSVARAMLRFVTVTAEALRFRQIQRGFRTTLDDLSGRSYVMTAEDVDLTLNWGRLSSVLPDYHGQDSVRVGRISFGSINAILGSVALILNSHHHASRVAR

SEQ ID NO: 189 - protein, 520 aa, Artificial Sequence
  source: /note="Description of Artificial Sequence: Synthetic polypeptide"
  source: /note="Multivalent CD20-binding molecule component 143"
QVQLQQPGAELVKPGASVKMSCKTSGYTFTSYNVHWVKQTPGQGLEWIGAIYPGNGDTSFNQKFKGKATLTADKSSSTVYMQLSSLTSEDSAVYYCARSNYYGSSYVWFFDVWGAGTTVTVSSGSTSGSGKPGSGEGSQIVLSQSPTILSASPGEKVTMTCRASSSVSYMDWYQQKPGSSPKPWIYATSNLASGVPARFSGSGSGTSYSLTISRVEAEDAATYYCQQWISNPPTFGAGTKLELKEFPKPSTPPGSSGGAPGILGFVFTLKEFTLDFSTAKTYVDSLNVIRSAIGTPLQTISSGGTSLLMIDSGSGDNLFAVDVRGIDPEEGRFNNLRLIVERNNLYVTGFVNRTNNVFYRFADFSHVTFPGTTAVTLSGDSSYTTLQRVAGISRTGMQINRHSLTTSYLDLMSHSGTSLTQSVARAMLRFVTVTAEALRFRQIQRGFRTTLDDLSGRSYVMTAEDVDLTLNWGRLSSVLPDYHGQDSVRVGRISFGSINAILGSVALILNSHHHASRVAR

SEQ ID NO: 190 - protein, 510 aa, Artificial Sequence
  source: /note="Description of Artificial Sequence: Synthetic polypeptide"
  source: /note="Multivalent CD20-binding molecule component 144"
QVQLQQPGAELVKPGASVKMSCKTSGYTFTSYNVHWVKQTPGQGLEWIGAIYPGNGDTSFNQKFKGKATLTADKSSSTVYMQLSSLTSEDSAVYYCARSNYYGSSYVWFFDVWGAGTTVTVSSGGGGSQIVLSQSPTILSASPGEKVTMTCRASSSVSYMDWYQQKPGSSPKPWIYATSNLASGVPARFSGSGSGTSYSLTISRVEAEDAATYYCQQWISNPPTFGAGTKLELKEFPKPSTPPGSSGGAPGILGFVFTLKEFTLDFSTAKTYVDSLNVIRSAIGTPLQTISSGGTSLLMIDSGSGDNLFAVDVRGIDPEEGRFNNLRLIVERNNLYVTGFVNRTNNVFYRFADFSHVTFPGTTAVTLSGDSSYTTLQRVAGISRTGMQINRHSLTTSYLDLMSHSGTSLTQSVARAMLRFVTVTAEALRFRQIQRGFRTTLDDLSGRSYVMTAEDVDLTLNWGRLSSVLPDYHGQDSVRVGRISFGSINAILGSVALILNSHHHASRVAR

SEQ ID NO: 191 - protein, 492 aa, Artificial Sequence
  source: /note="Description of Artificial Sequence: Synthetic polypeptide"
  source: /note="Multivalent CD20-binding molecule component 145"
QVQLQQPGAELVKPGASVKMSCKTSGYTFTSYNVHWVKQTPGQGLEWIGAIYPGNGDTSFNQKFKGKATLTADKSSSTVYMQLSSLTSEDSAVYYCARSNYYGSSYVWFFDVWGAGTTVTVSSGGGGSQIVLSQSPTILSASPGEKVTMTCRASSSVSYMDWYQQKPGSSPKPWIYATSNLASGVPARFSGSGSGTSYSLTISRVEAEDAATYYCQQWISNPPTFGAGTKLELKGGGGSGGKEFTLDFSTAKTYVDSLNVIRSAIGTPLQTISSGGTSLLMIDSGTGDNLFAVDVRGIDPEEGRFNNLRLIVERNNLYVTGFVNRTNNVFYRFADFSHVTFPGTTAVTLSGDSSYTTLQRVAGISRTGMQINRHSLTTSYLDLMSHSGTSLTQSVARAMLRFVTVTAEALRFRQIQRGFRTTLDDLSGRSYVMTAEDVDLTLNWGRLSSVLPDYHGQDSVRVGRISFGSINAILGSVALILNSHHHASRVAR

SEQ ID NO: 192 - protein, 517 aa, Artificial Sequence
  source: /note="Description of Artificial Sequence: Synthetic polypeptide"
  source: /note="Multivalent CD20-binding molecule component 146"
QVQLQQPGAELVKPGASVKMSCKTSGYTFTSYNVHWVKQTPGQGLEWIGAIYPGNGDTSFNQKFKGKATLTADKSSSTVYMQLSSLTSEDSAVYYCARSNYYGSSYVWFFDVWGAGTTVTVSSGGGGSGGGGSGGGGSGGGGSGGGGSQIVLSQSPTILSASPGEKVTMTCRASSSVSYMDWYQQKPGSSPKPWIYATSNLASGVPARFSGSGSGTSYSLTISRVEAEDAATYYCQQWISNPPTFGAGTKLELKEFPKPSTPPGSSGGAPKEFTLDFSTAKTYVDSLNVIRSAIGTPLQTISSGGTSLLMIDSGSGDNLFAVDVRGIAPEEGRFNNLRLIVERNNLYVTGFVNRTNNVFYRFADFSHVTFPGTTAVTLSADSSYTTLQRVAGISRTGMQINRHSLTTSYLDLMSHSATSLTQSVARAMLRFVTVTAEALRFRQIQRGFRTTLDDLSGASYVMTAEDVDLTLNWGRLSSVLPDYHGQDSVRVGRISFGSINAILGSVALILNSHHHAS

SEQ ID NO: 193 - protein, 511 aa, Artificial Sequence
  source: /note="Description of Artificial Sequence: Synthetic polypeptide"
  source: /note="Multivalent CD20-binding molecule component 147"
QVQLQQPGAELVKPGASVKMSCKTSGYTFTSYNVHWVKQTPGQGLEWIGAIYPGNGDTSFNQKFKGKATLTADKSSSTVYMQLSSLTSEDSAVYYCARSNYYGSSYVWFFDVWGAGTTVTVSSGSTSGSGKPGSGEGSQIVLSQSPTILSASPGEKVTMTCRASSSVSYMDWYQQKPGSSPKPWIYATSNLASGVPARFSGSGSGTSYSLTISRVEAEDAATYYCQQWISNPPTFGAGTKLELKEFPKPSTPPGSSGGAPKEFTLDFSTAKTYVDSLNVIRSAIGTPLQTISSGGTSLLMIDNLVPMVATVVDVRGIDPEEGRFNNLRLIVERNNLYVTGFVNRTNNVFYRFADFSHVTFPGTTAVTLSGDSSYTTLQRVAGISRTGMQINRHSLTTSYLDLMSHSGTSLTQSVARAMLRFVTVTAEALRFRQIQRGFRTTLDDLSGRSYVMTAEDVDLTLNWGRLSSVLPDYHGQDSVRVGRISFGSINAILGSVALILNSHHHASRVAR

SEQ ID NO: 194 - protein, 526 aa, Artificial Sequence
  source: /note="Description of Artificial Sequence: Synthetic polypeptide"
  source: /note="Multivalent CD20-binding molecule component 148"
QVQLQQPGAELVKPGASVKMSCKTSGYTFTSYNVHWVKQTPGQGLEWIGAIYPGNGDTSFNQKFKGKATLTADKSSSTVYMQLSSLTSEDSAVYYCARSNYYGSSYVWFFDVWGAGTTVTVSSGGGGSGGGGSGGGGSGGGGSGGGGSQIVLSQSPTILSASPGEKVTMTCRASSSVSYMDWYQQKPGSSPKPWIYATSNLASGVPARFSGSGSGTSYSLTISRVEAEDAATYYCQQWISNPPTFGAGTKLELKEFPKPSTPPGSSGGAPGILGFVFTLKEFTLDFSTAKTYVDSLNVIRSAIGTPLQTISSGGTSLLMIDSGSGDNLFAVDVRGIDPEEGRFNNLRLIVERNNLYVTGFVNRTNNVFYRFADFSHVTFPGTTAVTLSGDSSYTTLQRVAGISRTGMQINRHSLTTSYLDLMSHSGTSLTQSVARAMLRFVTVTAEALRFRQIQRGFRTTLDDLSGRSYVMTAEDVDLTLNWGRLSSVLPDYHGQDSVRVGRISFGSINAILGSVALILNSHHHAS

SEQ ID NO: 195 - protein, 525 aa, Artificial Sequence
  source: /note="Description of Artificial Sequence: Synthetic polypeptide"
  source: /note="Multivalent CD20-binding molecule component 149"
QVQLQQPGAELVKPGASVKMSCKTSGYTFTSYNVHWVKQTPGQGLEWIGAIYPGNGDTSFNQKFKGKATLTADKSSSTVYMQLSSLTSEDSAVYYCARSNYYGSSYVWFFDVWGAGTTVTVSSGGGGSGGGGSGGGGSGGGGSGGGGSQIVLSQSPTILSASPGEKVTMTCRASSSVSYMDWYQQKPGSSPKPWIYATSNLASGVPARFSGSGSGTSYSLTISRVEAEDAATYYCQQWISNPPTFGAGTKLELKEFPKPSTPPGSSGGAPKEFTLDFSTAKTYVDSLNVIRSAIGTPLQTISSGGTSLLMIDSGSGDNLFAVDVRGIDPEEGRFNNLRLIVERNNLYVTGFVNRTNNVFYRFADFSHVTFPGTTAVTLSGDSSYTTLQRVAGISRTGMQINRHSLTTSYLDLMSHSGTSLTQSVARAMLRFVTVTAEALRFRQIQRGFRTTLDDLSGRSYVMTAEDVDLTLNWGRLSSVLPDYHGQDSVRVGRISFGSINAILGSVALILNSHHHASRVARKDEL

SEQ ID NO: 196 - protein, 515 aa, Artificial Sequence
  source: /note="Description of Artificial Sequence: Synthetic polypeptide"
  source: /note="Multivalent CD20-binding molecule component 150"
QVQLQQPGAELVKPGASVKMSCKTSGYTFTSYNVHWVKQTPGQGLEWIGAIYPGNGDTSFNQKFKGKATLTADKSSSTVYMQLSSLTSEDSAVYYCARSNYYGSSYVWFFDVWGAGTTVTVSSGSTSGSGKPGSGEGSQIVLSQSPTILSASPGEKVTMTCRASSSVSYMDWYQQKPGSSPKPWIYATSNLASGVPARFSGSGSGTSYSLTISRVEAEDAATYYCQQWISNPPTFGAGTKLELKEFPKPSTPPGSSGGAPKEFTLDFSTAKTYVDSLNVIRSAIGTPLQTISSGGTSLLMIDSGSGDNLFAVDVRGIDPEEGRFNNLRLIVERNNLYVTGFVNRTNNVFYRFADFSHVTFPGTTAVTLSGDSSYTTLQRVAGISRTGMQINRHSLTTSYLDLMSHSGTSLTQSVARAMLRFVTVTAEALRFRQIQRGFRTTLDDLSGRSYVMTAEDVDLTLNWGRLSSVLPDYHGQDSVRVGRISFGSINAILGSVALILNSHHHASRVARKDEL

SEQ ID NO: 197 - protein, 505 aa, Artificial Sequence
  source: /note="Description of Artificial Sequence: Synthetic polypeptide"
  source: /note="Multivalent CD20-binding molecule component 151"
QVQLQQPGAELVKPGASVKMSCKTSGYTFTSYNVHWVKQTPGQGLEWIGAIYPGNGDTSFNQKFKGKATLTADKSSSTVYMQLSSLTSEDSAVYYCARSNYYGSSYVWFFDVWGAGTTVTVSSGGGGSQIVLSQSPTILSASPGEKVTMTCRASSSVSYMDWYQQKPGSSPKPWIYATSNLASGVPARFSGSGSGTSYSLTISRVEAEDAATYYCQQWISNPPTFGAGTKLELKEFPKPSTPPGSSGGAPKEFTLDFSTAKTYVDSLNVIRSAIGTPLQTISSGGTSLLMIDSGSGDNLFAVDVRGIDPEEGRFNNLRLIVERNNLYVTGFVNRTNNVFYRFADFSHVTFPGTTAVTLSGDSSYTTLQRVAGISRTGMQINRHSLTTSYLDLMSHSGTSLTQSVARAMLRFVTVTAEALRFRQIQRGFRTTLDDLSGRSYVMTAEDVDLTLNWGRLSSVLPDYHGQDSVRVGRISFGSINAILGSVALILNSHHHASRVARKDEL

SEQ ID NO: 198 - protein, 516 aa, Artificial Sequence
  source: /note="Description of Artificial Sequence: Synthetic polypeptide"
  source: /note="Multivalent CD20-binding molecule component 152"
QVQLQQPGAELVKPGASVKMSCKTSGYTFTSYNVHWVKQTPGQGLEWIGAIYPGNGDTSFNQKFKGKATLTADKSSSTVYMQLSSLTSEDSAVYYCARSNYYGSSYVWFFDVWGAGTTVTVSSGGGGSGGGGSGGGGSGGGGSGGGGSQIVLSQSPTILSASPGEKVTMTCRASSSVSYMDWYQQKPGSSPKPWIYATSNLASGVPARFSGSGSGTSYSLTISRVEAEDAATYYCQQWISNPPTFGAGTKLELKGGGGSGGKEFTLDFSTAKTYVDSLNVIRSAIGTPLQTISSGGTSLLMIDSGSGDNLFAVDVRGIDPEEGRFNNLRLIVERNNLYVTGFVNRTNNVFYRFADFSHVTFPGTTAVTLSGDSSYTTLQRVAGISRTGMQINRHSLTTSYLDLMSHSGTSLTQSVARAMLRFVTVTAEALRFRQIQRGFRTTLDDLSGRSYVMTAEDVDLTLNWGRLSSVLPDYHGQDSVRVGRISFGSINAILGSVALILNSHHHASRVARKDEL

SEQ ID NO: 199 - protein, 506 aa, Artificial Sequence
  source: /note="Description of Artificial Sequence: Synthetic polypeptide"
  source: /note="Multivalent CD20-binding molecule component 153"
QVQLQQPGAELVKPGASVKMSCKTSGYTFTSYNVHWVKQTPGQGLEWIGAIYPGNGDTSFNQKFKGKATLTADKSSSTVYMQLSSLTSEDSAVYYCARSNYYGSSYVWFFDVWGAGTTVTVSSGSTSGSGKPGSGEGSQIVLSQSPTILSASPGEKVTMTCRASSSVSYMDWYQQKPGSSPKPWIYATSNLASGVPARFSGSGSGTSYSLTISRVEAEDAATYYCQQWISNPPTFGAGTKLELKGGGGSGGKEFTLDFSTAKTYVDSLNVIRSAIGTPLQTISSGGTSLLMIDSGSGDNLFAVDVRGIDPEEGRFNNLRLIVERNNLYVTGFVNRTNNVFYRFADFSHVTFPGTTAVTLSGDSSYTTLQRVAGISRTGMQINRHSLTTSYLDLMSHSGTSLTQSVARAMLRFVTVTAEALRFRQIQRGFRTTLDDLSGRSYVMTAEDVDLTLNWGRLSSVLPDYHGQDSVRVGRISFGSINAILGSVALILNSHHHASRVARKDEL

SEQ ID NO: 200 - protein, 534 aa, Artificial Sequence
  source: /note="Description of Artificial Sequence: Synthetic polypeptide"
  source: /note="Multivalent CD20-binding molecule component 154"
QVQLQQPGAELVKPGASVKMSCKTSGYTFTSYNVHWVKQTPGQGLEWIGAIYPGNGDTSFNQKFKGKATLTADKSSSTVYMQLSSLTSEDSAVYYCARSNYYGSSYVWFFDVWGAGTTVTVSSGGGGSGGGGSGGGGSGGGGSGGGGSQIVLSQSPTILSASPGEKVTMTCRASSSVSYMDWYQQKPGSSPKPWIYATSNLASGVPARFSGSGSGTSYSLTISRVEAEDAATYYCQQWISNPPTFGAGTKLELKEFPKPSTPPGSSGGAPGILGFVFTLKEFTLDFSTAKTYVDSLNVIRSAIGTPLQTISSGGTSLLMIDSGSGDNLFAVDVRGIDPEEGRFNNLRLIVERNNLYVTGFVNRTNNVFYRFADFSHVTFPGTTAVTLSGDSSYTTLQRVAGISRTGMQINRHSLTTSYLDLMSHSGTSLTQSVARAMLRFVTVTAEALRFRQIQRGFRTTLDDLSGRSYVMTAEDVDLTLNWGRLSSVLPDYHGQDSVRVGRISFGSINAILGSVALILNSHHHASRVARKDEL

SEQ ID NO: 201 - protein, 524 aa, Artificial Sequence
  source: /note="Description of Artificial Sequence: Synthetic polypeptide"
  source: /note="Multivalent CD20-binding molecule component 155"
QVQLQQPGAELVKPGASVKMSCKTSGYTFTSYNVHWVKQTPGQGLEWIGAIYPGNGDTSFNQKFKGKATLTADKSSSTVYMQLSSLTSEDSAVYYCARSNYYGSSYVWFFDVWGAGTTVTVSSGSTSGSGKPGSGEGSQIVLSQSPTILSASPGEKVTMTCRASSSVSYMDWYQQKPGSSPKPWIYATSNLASGVPARFSGSGSGTSYSLTISRVEAEDAATYYCQQWISNPPTFGAGTKLELKEFPKPSTPPGSSGGAPGILGFVFTLKEFTLDFSTAKTYVDSLNVIRSAIGTPLQTISSGGTSLLMIDSGSGDNLFAVDVRGIDPEEGRFNNLRLIVERNNLYVTGFVNRTNNVFYRFADFSHVTFPGTTAVTLSGDSSYTTLQRVAGISRTGMQINRHSLTTSYLDLMSHSGTSLTQSVARAMLRFVTVTAEALRFRQIQRGFRTTLDDLSGRSYVMTAEDVDLTLNWGRLSSVLPDYHGQDSVRVGRISFGSINAILGSVALILNSHHHASRVARKDEL

SEQ ID NO: 202 - protein, 514 aa, Artificial Sequence
  source: /note="Description of Artificial Sequence: Synthetic polypeptide"
  source: /note="Multivalent CD20-binding molecule component 156"
QVQLQQPGAELVKPGASVKMSCKTSGYTFTSYNVHWVKQTPGQGLEWIGAIYPGNGDTSFNQKFKGKATLTADKSSSTVYMQLSSLTSEDSAVYYCARSNYYGSSYVWFFDVWGAGTTVTVSSGGGGSQIVLSQSPTILSASPGEKVTMTCRASSSVSYMDWYQQKPGSSPKPWIYATSNLASGVPARFSGSGSGTSYSLTISRVEAEDAATYYCQQWISNPPTFGAGTKLELKEFPKPSTPPGSSGGAPGILGFVFTLKEFTLDFSTAKTYVDSLNVIRSAIGTPLQTISSGGTSLLMIDSGSGDNLFAVDVRGIDPEEGRFNNLRLIVERNNLYVTGFVNRTNNVFYRFADFSHVTFPGTTAVTLSGDSSYTTLQRVAGISRTGMQINRHSLTTSYLDLMSHSGTSLTQSVARAMLRFVTVTAEALRFRQIQRGFRTTLDDLSGRSYVMTAEDVDLTLNWGRLSSVLPDYHGQDSVRVGRISFGSINAILGSVALILNSHHHASRVARKDEL

SEQ ID NO: 203 - protein, 496 aa, Artificial Sequence
  source: /note="Description of Artificial Sequence: Synthetic polypeptide"
  source: /note="Multivalent CD20-binding molecule component 157"
QVQLQQPGAELVKPGASVKMSCKTSGYTFTSYNVHWVKQTPGQGLEWIGAIYPGNGDTSFNQKFKGKATLTADKSSSTVYMQLSSLTSEDSAVYYCARSNYYGSSYVWFFDVWGAGTTVTVSSGGGGSQIVLSQSPTILSASPGEKVTMTCRASSSVSYMDWYQQKPGSSPKPWIYATSNLASGVPARFSGSGSGTSYSLTISRVEAEDAATYYCQQWISNPPTFGAGTKLELKGGGGSGGKEFTLDFSTAKTYVDSLNVIRSAIGTPLQTISSGGTSLLMIDSGTGDNLFAVDVRGIDPEEGRFNNLRLIVERNNLYVTGFVNRTNNVFYRFADFSHVTFPGTTAVTLSGDSSYTTLQRVAGISRTGMQINRHSLTTSYLDLMSHSGTSLTQSVARAMLRFVTVTAEALRFRQIQRGFRTTLDDLSGRSYVMTAEDVDLTLNWGRLSSVLPDYHGQDSVRVGRISFGSINAILGSVALILNSHHHASRVARKDEL

SEQ ID NO: 204 - protein, 521 aa, Artificial Sequence
  source: /note="Description of Artificial Sequence: Synthetic polypeptide"
  source: /note="Multivalent CD20-binding molecule component 158"
QVQLQQPGAELVKPGASVKMSCKTSGYTFTSYNVHWVKQTPGQGLEWIGAIYPGNGDTSFNQKFKGKATLTADKSSSTVYMQLSSLTSEDSAVYYCARSNYYGSSYVWFFDVWGAGTTVTVSSGGGGSGGGGSGGGGSGGGGSGGGGSQIVLSQSPTILSASPGEKVTMTCRASSSVSYMDWYQQKPGSSPKPWIYATSNLASGVPARFSGSGSGTSYSLTISRVEAEDAATYYCQQWISNPPTFGAGTKLELKEFPKPSTPPGSSGGAPKEFTLDFSTAKTYVDSLNVIRSAIGTPLQTISSGGTSLLMIDSGSGDNLFAVDVRGIAPEEGRFNNLRLIVERNNLYVTGFVNRTNNVFYRFADFSHVTFPGTTAVTLSADSSYTTLQRVAGISRTGMQINRHSLTTSYLDLMSHSATSLTQSVARAMLRFVTVTAEALRFRQIQRGFRTTLDDLSGASYVMTAEDVDLTLNWGRLSSVLPDYHGQDSVRVGRISFGSINAILGSVALILNSHHHASKDEL

SEQ ID NO: 205 - protein, 515 aa, Artificial Sequence
  source: /note="Description of Artificial Sequence: Synthetic polypeptide"
  source: /note="Multivalent CD20-binding molecule component 159"
QVQLQQPGAELVKPGASVKMSCKTSGYTFTSYNVHWVKQTPGQGLEWIGAIYPGNGDTSFNQKFKGKATLTADKSSSTVYMQLSSLTSEDSAVYYCARSNYYGSSYVWFFDVWGAGTTVTVSSGSTSGSGKPGSGEGSQIVLSQSPTILSASPGEKVTMTCRASSSVSYMDWYQQKPGSSPKPWIYATSNLASGVPARFSGSGSGTSYSLTISRVEAEDAATYYCQQWISNPPTFGAGTKLELKEFPKPSTPPGSSGGAPKEFTLDFSTAKTYVDSLNVIRSAIGTPLQTISSGGTSLLMIDNLVPMVATVVDVRGIDPEEGRFNNLRLIVERNNLYVTGFVNRTNNVFYRFADFSHVTFPGTTAVTLSGDSSYTTLQRVAGISRTGMQINRHSLTTSYLDLMSHSGTSLTQSVARAMLRFVTVTAEALRFRQIQRGFRTTLDDLSGRSYVMTAEDVDLTLNWGRLSSVLPDYHGQDSVRVGRISFGSINAILGSVALILNSHHHASRVARKDEL

SEQ ID NO: 206 - protein, 530 aa, Artificial Sequence
  source: /note="Description of Artificial Sequence: Synthetic polypeptide"
  source: /note="Multivalent CD20-binding molecule component 160"
QVQLQQPGAELVKPGASVKMSCKTSGYTFTSYNVHWVKQTPGQGLEWIGAIYPGNGDTSFNQKFKGKATLTADKSSSTVYMQLSSLTSEDSAVYYCARSNYYGSSYVWFFDVWGAGTTVTVSSGGGGSGGGGSGGGGSGGGGSGGGGSQIVLSQSPTILSASPGEKVTMTCRASSSVSYMDWYQQKPGSSPKPWIYATSNLASGVPARFSGSGSGTSYSLTISRVEAEDAATYYCQQWISNPPTFGAGTKLELKEFPKPSTPPGSSGGAPGILGFVFTLKEFTLDFSTAKTYVDSLNVIRSAIGTPLQTISSGGTSLLMIDSGSGDNLFAVDVRGIDPEEGRFNNLRLIVERNNLYVTGFVNRTNNVFYRFADFSHVTFPGTTAVTLSGDSSYTTLQRVAGISRTGMQINRHSLTTSYLDLMSHSGTSLTQSVARAMLRFVTVTAEALRFRQIQRGFRTTLDDLSGRSYVMTAEDVDLTLNWGRLSSVLPDYHGQDSVRVGRISFGSINAILGSVALILNSHHHASKDEL

SEQ ID NO: 207 - protein, 512 aa, Artificial Sequence
  source: /note="Description of Artificial Sequence: Synthetic polypeptide"
  source: /note="Multivalent CD20-binding molecule component 161"
QVQLQQPGAELVKPGASVKMSCKASGYTFTSYNMHWVKQTPGRGLEWIGAIYPGNGDTSYNQKFKGKATLTADKSSSTAYMQLSSLTSEDSAVYYCARSTYYGGDWYFNVWGAGTTVTVSAGSTSGSGKPGSGEGSTKGQIVLSQSPAILSASPGEKVTMTCRASSSVSYIHWFQQKPGSSPKPWIYATSNLASGVPVRFSGSGSGTSYSLTISRVEAEDAATYYCQQWTSNPPTFGGGTKLEIKEFPKPSTPPGSSGGAPKEFTLDFSTAKTYVDSLNVIRSAIGTPLQTISSGGTSLLMIDSGSGDNLFAVDVRGIDPEEGRFNNLRLIVERNNLYVTGFVNRTNNVFYRFADFSHVTFPGTTAVTLSGDSSYTTLQRVAGISRTGMQINRHSLTTSYLDLMSHSGTSLTQSVARAMLRFVTVTAEALRFRQIQRGFRTTLDDLSGRSYVMTAEDVDLTLNWGRLSSVLPDYHGQDSVRVGRISFGSINAILGSVALILNSHHHASRVAR

SEQ ID NO: 208 - protein, 493 aa, Artificial Sequence
  source: /note="Description of Artificial Sequence: Synthetic polypeptide"
  source: /note="Multivalent CD20-binding molecule component 162"
QVQLQQPGAELVKPGASVKMSCKASGYTFTSYNMHWVKQTPGRGLEWIGAIYPGNGDTSYNQKFKGKATLTADKSSSTAYMQLSSLTSEDSAVYYCARSTYYGGDWYFNVWGAGTTVTVSAGGGGSTKGQIVLSQSPAILSASPGEKVTMTCRASSSVSYIHWFQQKPGSSPKPWIYATSNLASGVPVRFSGSGSGTSYSLTISRVEAEDAATYYCQQWTSNPPTFGGGTKLEIKGGGGSGGKEFTLDFSTAKTYVDSLNVIRSAIGTPLQTISSGGTSLLMIDSGSGDNLFAVDVRGIDPEEGRFNNLRLIVERNNLYVTGFVNRTNNVFYRFADFSHVTFPGTTAVTLSGDSSYTTLQRVAGISRTGMQINRHSLTTSYLDLMSHSGTSLTQSVARAMLRFVTVTAEALRFRQIQRGFRTTLDDLSGRSYVMTAEDVDLTLNWGRLSSVLPDYHGQDSVRVGRISFGSINAILGSVALILNSHHHASRVAR

SEQ ID NO: 209 - protein, 526 aa, Artificial Sequence
  source: /note="Description of Artificial Sequence: Synthetic polypeptide"
  source: /note="Multivalent CD20-binding molecule component 163"
QVQLQQPGAELVKPGASVKMSCKASGYTFTSYNMHWVKQTPGRGLEWIGAIYPGNGDTSYNQKFKGKATLTADKSSSTAYMQLSSLTSEDSAVYYCARSTYYGGDWYFNVWGAGTTVTVSAGGGGSGGGGSGGGGSGGGGSGGGGSTKGQIVLSQSPAILSASPGEKVTMTCRASSSVSYIHWFQQKPGSSPKPWIYATSNLASGVPVRFSGSGSGTSYSLTISRVEAEDAATYYCQQWTSNPPTFGGGTKLEIKEFPKPSTPPGSSGGAPKEFTLDFSTAKTYVDSLNVIRSAIGTPLQTISSGGTSLLMIDSGTGDNLFAVDVRGIDPEEGRFNNLRLIVERNNLYVTGFVNRTNNVFYRFADFSHVTFPGTTAVTLSGDSSYTTLQRVAGISRTGMQINRHSLTTSYLDLMSHSGTSLTQSVARAMLRFVTVTAEALRFRQIQRGFRTTLDDLSGRSYVMTAEDVDLTLNWGRLSSVLPDYHGQDSVRVGRISFGSINAILGSVALILNSHHHASRVARKDEL

SEQ ID NO: 210 - protein, 502 aa, Artificial Sequence
  source: /note="Description of Artificial Sequence: Synthetic polypeptide"
  source: /note="Multivalent CD20-binding molecule component 164"
QVQLQQPGAELVKPGASVKMSCKASGYTFTSYNMHWVKQTPGRGLEWIGAIYPGNGDTSYNQKFKGKATLTADKSSSTAYMQLSSLTSEDSAVYYCARSTYYGGDWYFNVWGAGTTVTVSAGGGGSTKGQIVLSQSPAILSASPGEKVTMTCRASSSVSYIHWFQQKPGSSPKPWIYATSNLASGVPVRFSGSGSGTSYSLTISRVEAEDAATYYCQQWTSNPPTFGGGTKLEIKEFPKPSTPPGSSGGAPKEFTLDFSTAKTYVDSLNVIRSAIGTPLQTISSGGTSLLMIDSGSGDNLFAVDVRGIAPEEGRFNNLRLIVERNNLYVTGFVNRTNNVFYRFADFSHVTFPGTTAVTLSADSSYTTLQRVAGISRTGMQINRHSLTTSYLDLMSHSATSLTQSVARAMLRFVTVTAEALRFRQIQRGFRTTLDDLSGASYVMTAEDVDLTLNWGRLSSVLPDYHGQDSVRVGRISFGSINAILGSVALILNSHHHASRVAR

SEQ ID NO: 211 - protein, 512 aa, Artificial Sequence
  source: /note="Description of Artificial Sequence: Synthetic polypeptide"
  source: /note="Multivalent CD20-binding molecule component 165"
QVQLQQPGAELVKPGASVKMSCKASGYTFTSYNMHWVKQTPGRGLEWIGAIYPGNGDTSYNQKFKGKATLTADKSSSTAYMQLSSLTSEDSAVYYCARSTYYGGDWYFNVWGAGTTVTVSAGSTSGSGKPGSGEGSTKGQIVLSQSPAILSASPGEKVTMTCRASSSVSYIHWFQQKPGSSPKPWIYATSNLASGVPVRFSGSGSGTSYSLTISRVEAEDAATYYCQQWTSNPPTFGGGTKLEIKEFPKPSTPPGSSGGAPKEFTLDFSTAKTYVDSLNVIRSAIGTPLQTISSGGTSLLMIDNLVPMVATVVDVRGIDPEEGRFNNLRLIVERNNLYVTGFVNRTNNVFYRFADFSHVTFPGTTAVTLSGDSSYTTLQRVAGISRTGMQINRHSLTTSYLDLMSHSGTSLTQSVARAMLRFVTVTAEALRFRQIQRGFRTTLDDLSGRSYVMTAEDVDLTLNWGRLSSVLPDYHGQDSVRVGRISFGSINAILGSVALILNSHHHASRVAR

SEQ ID NO: 212 - protein, 521 aa, Artificial Sequence
  source: /note="Description of Artificial Sequence: Synthetic polypeptide"
  source: /note="Multivalent CD20-binding molecule component 166"
QVQLQQPGAELVKPGASVKMSCKASGYTFTSYNMHWVKQTPGRGLEWIGAIYPGNGDTSYNQKFKGKATLTADKSSSTAYMQLSSLTSEDSAVYYCARSTYYGGDWYFNVWGAGTTVTVSAGSTSGSGKPGSGEGSTKGQIVLSQSPAILSASPGEKVTMTCRASSSVSYIHWFQQKPGSSPKPWIYATSNLASGVPVRFSGSGSGTSYSLTISRVEAEDAATYYCQQWTSNPPTFGGGTKLEIKEFPKPSTPPGSSGGAPGILGFVFTLKEFTLDFSTAKTYVDSLNVIRSAIGTPLQTISSGGTSLLMIDSGSGDNLFAVDVRGIDPEEGRFNNLRLIVERNNLYVTGFVNRTNNVFYRFADFSHVTFPGTTAVTLSGDSSYTTLQRVAGISRTGMQINRHSLTTSYLDLMSHSGTSLTQSVARAMLRFVTVTAEALRFRQIQRGFRTTLDDLSGRSYVMTAEDVDLTLNWGRLSSVLPDYHGQDSVRVGRISFGSINAILGSVALILNSHHHASAVAA

SEQ ID NO: 213 - protein, 512 aa, Artificial Sequence; identical to SEQ ID NO: 207
  source: /note="Description of Artificial Sequence: Synthetic polypeptide"
  source: /note="Multivalent CD20-binding molecule component 167"

SEQ ID NO: 214 - protein, 513 aa, Artificial Sequence
  source: /note="Description of Artificial Sequence: Synthetic polypeptide"
  source: /note="Multivalent CD20-binding molecule component 168"
QVQLQQPGAELVKPGASVKMSCKASGYTFTSYNMHWVKQTPGRGLEWIGAIYPGNGDTSYNQKFKGKATLTADKSSSTAYMQLSSLTSEDSAVYYCARSTYYGGDWYFNVWGAGTTVTVSAGGGGSGGGGSGGGGSGGGGSGGGGSTKGQIVLSQSPAILSASPGEKVTMTCRASSSVSYIHWFQQKPGSSPKPWIYATSNLASGVPVRFSGSGSGTSYSLTISRVEAEDAATYYCQQWTSNPPTFGGGTKLEIKGGGGSGGKEFTLDFSTAKTYVDSLNVIRSAIGTPLQTISSGGTSLLMIDSGSGDNLFAVDVRGIDPEEGRFNNLRLIVERNNLYVTGFVNRTNNVFYRFADFSHVTFPGTTAVTLSGDSSYTTLQRVAGISRTGMQINRHSLTTSYLDLMSHSGTSLTQSVARAMLRFVTVTAEALRFRQIQRGFRTTLDDLSGRSYVMTAEDVDLTLNWGRLSSVLPDYHGQDSVRVGRISFGSINAILGSVALILNSHHHASRVAR

SEQ ID NO: 215 - protein, 493 aa, Artificial Sequence
  source: /note="Description of Artificial Sequence: Synthetic polypeptide"
  source: /note="Multivalent CD20-binding molecule component 169"
QVQLQQPGAELVKPGASVKMSCKASGYTFTSYNMHWVKQTPGRGLEWIGAIYPGNGDTSYNQKFKGKATLTADKSSSTAYMQLSSLTSEDSAVYYCARSTYYGGDWYFNVWGAGTTVTVSAGGGGSTKGQIVLSQSPAILSASPGEKVTMTCRASSSVSYIHWFQQKPGSSPKPWIYATSNLASGVPVRFSGSGSGTSYSLTISRVEAEDAATYYCQQWTSNPPTFGGGTKLEIKGGGGSGGKEFTLDFSTAKTYVDSLNVIRSAIGTPLQTISSGGTSLLMIDSGTGDNLFAVDVRGIDPEEGRFNNLRLIVERNNLYVTGFVNRTNNVFYRFADFSHVTFPGTTAVTLSGDSSYTTLQRVAGISRTGMQINRHSLTTSYLDLMSHSGTSLTQSVARAMLRFVTVTAEALRFRQIQRGFRTTLDDLSGRSYVMTAEDVDLTLNWGRLSSVLPDYHGQDSVRVGRISFGSINAILGSVALILNSHHHASRVAR

SEQ ID NO: 216 - protein, 508 aa, Artificial Sequence
  source: /note="Description of Artificial Sequence: Synthetic polypeptide"
  source: /note="Multivalent CD20-binding molecule component 170"
QVQLQQPGAELVKPGASVKMSCKASGYTFTSYNMHWVKQTPGRGLEWIGAIYPGNGDTSYNQKFKGKATLTADKSSSTAYMQLSSLTSEDSAVYYCARSTYYGGDWYFNVWGAGTTVTVSAGSTSGSGKPGSGEGSTKGQIVLSQSPAILSASPGEKVTMTCRASSSVSYIHWFQQKPGSSPKPWIYATSNLASGVPVRFSGSGSGTSYSLTISRVEAEDAATYYCQQWTSNPPTFGGGTKLEIKEFPKPSTPPGSSGGAPKEFTLDFSTAKTYVDSLNVIRSAIGTPLQTISSGGTSLLMIDSGSGDNLFAVDVRGIAPEEGRFNNLRLIVERNNLYVTGFVNRTNNVFYRFADFSHVTFPGTTAVTLSADSSYTTLQRVAGISRTGMQINRHSLTTSYLDLMSHSATSLTQSVARAMLRFVTVTAEALRFRQIQRGFRTTLDDLSGASYVMTAEDVDLTLNWGRLSSVLPDYHGQDSVRVGRISFGSINAILGSVALILNSHHHAS

SEQ ID NO: 217 - protein, 512 aa, Artificial Sequence; identical to SEQ ID NO: 211
  source: /note="Description of Artificial Sequence: Synthetic polypeptide"
  source: /note="Multivalent CD20-binding molecule component 171"

SEQ ID NO: 218 - protein, 517 aa, Artificial Sequence
  source: /note="Description of Artificial Sequence: Synthetic polypeptide"
  source: /note="Multivalent CD20-binding molecule component 172"
QVQLQQPGAELVKPGASVKMSCKASGYTFTSYNMHWVKQTPGRGLEWIGAIYPGNGDTSYNQKFKGKATLTADKSSSTAYMQLSSLTSEDSAVYYCARSTYYGGDWYFNVWGAGTTVTVSAGSTSGSGKPGSGEGSTKGQIVLSQSPAILSASPGEKVTMTCRASSSVSYIHWFQQKPGSSPKPWIYATSNLASGVPVRFSGSGSGTSYSLTISRVEAEDAATYYCQQWTSNPPTFGGGTKLEIKEFPKPSTPPGSSGGAPGILGFVFTLKEFTLDFSTAKTYVDSLNVIRSAIGTPLQTISSGGTSLLMIDSGSGDNLFAVDVRGIDPEEGRFNNLRLIVERNNLYVTGFVNRTNNVFYRFADFSHVTFPGTTAVTLSGDSSYTTLQRVAGISRTGMQINRHSLTTSYLDLMSHSGTSLTQSVARAMLRFVTVTAEALRFRQIQRGFRTTLDDLSGRSYVMTAEDVDLTLNWGRLSSVLPDYHGQDSVRVGRISFGSINAILGSVALILNSHHHAS

SEQ ID NO: 219 - protein, 511 aa, Artificial Sequence
  source: /note="Description of Artificial Sequence: Synthetic polypeptide"
  source: /note="Multivalent CD20-binding molecule component 173"
EIVLTQSPATLSLSPGERATLSCRASQSVSSYLAWYQQKPGQAPRLLIYDASNRATGIPARFSGSGSGTDFTLTISSLEPEDFAVYYCQQRSNWPITFGQGTRLEIKGSTSGSGKPGSGEGSEVQLVESGGGLVQPGRSLRLSCAASGFTFNDYAMHWVRQAPGKGLEWVSTISWNSGSIGYADSVKGRFTISRDNAKKSLYLQMNSLRAEDTALYYCAKDIQYGNYYYGMDVWGQGTTVTVSSEFPKPSTPPGSSGGAPKEFTLDFSTAKTYVDSLNVIRSAIGTPLQTISSGGTSLLMIDSGSGDNLFAVDVRGIDPEEGRFNNLRLIVERNNLYVTGFVNRTNNVFYRFADFSHVTFPGTTAVTLSGDSSYTTLQRVAGISRTGMQINRHSLTTSYLDLMSHSGTSLTQSVARAMLRFVTVTAEALRFRQIQRGFRTTLDDLSGRSYVMTAEDVDLTLNWGRLSSVLPDYHGQDSVRVGRISFGSINAILGSVALILNSHHHASRVAR

SEQ ID NO: 220 - protein, 501 aa, Artificial Sequence
  source: /note="Description of Artificial Sequence: Synthetic polypeptide"
  source: /note="Multivalent CD20-binding molecule component 174"
EIVLTQSPATLSLSPGERATLSCRASQSVSSYLAWYQQKPGQAPRLLIYDASNRATGIPARFSGSGSGTDFTLTISSLEPEDFAVYYCQQRSNWPITFGQGTRLEIKGGGGSEVQLVESGGGLVQPGRSLRLSCAASGFTFNDYAMHWVRQAPGKGLEWVSTISWNSGSIGYADSVKGRFTISRDNAKKSLYLQMNSLRAEDTALYYCAKDIQYGNYYYGMDVWGQGTTVTVSSEFPKPSTPPGSSGGAPKEFTLDFSTAKTYVDSLNVIRSAIGTPLQTISSGGTSLLMIDSGSGDNLFAVDVRGIDPEEGRFNNLRLIVERNNLYVTGFVNRTNNVFYRFADFSHVTFPGTTAVTLSGDSSYTTLQRVAGISRTGMQINRHSLTTSYLDLMSHSGTSLTQSVARAMLRFVTVTAEALRFRQIQRGFRTTLDDLSGRSYVMTAEDVDLTLNWGRLSSVLPDYHGQDSVRVGRISFGSINAILGSVALILNSHHHASRVAR

SEQ ID NO: 221 - protein, 511 aa, Artificial Sequence
  source: /note="Description of Artificial Sequence: Synthetic polypeptide"
  source: /note="Multivalent CD20-binding molecule component 175"
EIVLTQSPATLSLSPGERATLSCRASQSVSSYLAWYQQKPGQAPRLLIYDASNRATGIPARFSGSGSGTDFTLTISSLEPEDFAVYYCQQRSNWPITFGQGTRLEIKGSTSGSGKPGSGEGSEVQLVESGGGLVQPGRSLRLSCAASGFTFNDYAMHWVRQAPGKGLEWVSTISWNSGSIGYADSVKGRFTISRDNAKKSLYLQMNSLRAEDTALYYCAKDIQYGNYYYGMDVWGQGTTVTVSSEFPKPSTPPGSSGGAPKEFTLDFSTAKTYVDSLNVIRSAIGTPLQTISSGGTSLLMIDSGTGDNLFAVDVRGIDPEEGRFNNLRLIVERNNLYVTGFVNRTNNVFYRFADFSHVTFPGTTAVTLSGDSSYTTLQRVAGISRTGMQINRHSLTTSYLDLMSHSGTSLTQSVARAMLRFVTVTAEALRFRQIQRGFRTTLDDLSGRSYVMTAEDVDLTLNWGRLSSVLPDYHGQDSVRVGRISFGSINAILGSVALILNSHHHASRVAR

SEQ ID NO: 222 - protein, 511 aa, Artificial Sequence
  source: /note="Description of Artificial Sequence: Synthetic polypeptide"
  source: /note="Multivalent CD20-binding molecule component 176"
EIVLTQSPATLSLSPGERATLSCRASQSVSSYLAWYQQKPGQAPRLLIYDASNRATGIPARFSGSGSGTDFTLTISSLEPEDFAVYYCQQRSNWPITFGQGTRLEIKGSTSGSGKPGSGEGSEVQLVESGGGLVQPGRSLRLSCAASGFTFNDYAMHWVRQAPGKGLEWVSTISWNSGSIGYADSVKGRFTISRDNAKKSLYLQMNSLRAEDTALYYCAKDIQYGNYYYGMDVWGQGTTVTVSSEFPKPSTPPGSSGGAPKEFTLDFSTAKTYVDSLNVIRSAIGTPLQTISSGGTSLLMIDSGSGDNLFAVDVRGIAPEEGRFNNLRLIVERNNLYVTGFVNRTNNVFYRFADFSHVTFPGTTAVTLSADSSYTTLQRVAGISRTGMQINRHSLTTSYLDLMSHSATSLTQSVARAMLRFVTVTAEALRFRQIQRGFRTTLDDLSGASYVMTAEDVDLTLNWGRLSSVLPDYHGQDSVRVGRISFGSINAILGSVALILNSHHHASRVAR

SEQ ID NO: 223 - protein, 512 aa, Artificial Sequence
  source: /note="Description of Artificial Sequence: Synthetic polypeptide"
  source: /note="Multivalent CD20-binding molecule component 177"
EIVLTQSPATLSLSPGERATLSCRASQSVSSYLAWYQQKPGQAPRLLIYDASNRATGIPARFSGSGSGTDFTLTISSLEPEDFAVYYCQQRSNWPITFGQGTRLEIKGGGGSGGGGSGGGGSGGGGSGGGGSEVQLVESGGGLVQPGRSLRLSCAASGFTFNDYAMHWVRQAPGKGLEWVSTISWNSGSIGYADSVKGRFTISRDNAKKSLYLQMNSLRAEDTALYYCAKDIQYGNYYYGMDVWGQGTTVTVSSGGGGSGGKEFTLDFSTAKTYVDSLNVIRSAIGTPLQTISSGGTSLLMIDNLVPMVATVVDVRGIDPEEGRFNNLRLIVERNNLYVTGFVNRTNNVFYRFADFSHVTFPGTTAVTLSGDSSYTTLQRVAGISRTGMQINRHSLTTSYLDLMSHSGTSLTQSVARAMLRFVTVTAEALRFRQIQRGFRTTLDDLSGRSYVMTAEDVDLTLNWGRLSSVLPDYHGQDSVRVGRISFGSINAILGSVALILNSHHHASRVAR

SEQ ID NO: 224 - protein, 521 aa, Artificial Sequence
  source: /note="Description of Artificial Sequence: Synthetic polypeptide"
  source: /note="Multivalent CD20-binding molecule component 178"
EIVLTQSPATLSLSPGERATLSCRASQSVSSYLAWYQQKPGQAPRLLIYDASNRATGIPARFSGSGSGTDFTLTISSLEPEDFAVYYCQQRSNWPITFGQGTRLEIKGGGGSGGGGSGGGGSGGGGSGGGGSEVQLVESGGGLVQPGRSLRLSCAASGFTFNDYAMHWVRQAPGKGLEWVSTISWNSGSIGYADSVKGRFTISRDNAKKSLYLQMNSLRAEDTALYYCAKDIQYGNYYYGMDVWGQGTTVTVSSEFPKPSTPPGSSGGAPKEFTLDFSTAKTYVDSLNVIRSAIGTPLQTISSGGTSLLMIDSGSGDNLFAVDVRGIDPEEGRFNNLRLIVERNNLYVTGFVNRTNNVFYRFADFSHVTFPGTTAVTLSGDSSYTTLQRVAGISRTGMQINRHSLTTSYLDLMSHSGTSLTQSVARAMLRFVTVTAEALRFRQIQRGFRTTLDDLSGRSYVMTAEDVDLTLNWGRLSSVLPDYHGQDSVRVGRISFGSINAILGSVALILNSHHHASAVAA

SEQ ID NO: 225 - protein, 514 aa, Artificial Sequence
  source: /note="Description of Artificial Sequence: Synthetic polypeptide"
  source: /note="Multivalent CD20-binding molecule component 179"
QIVLSQSPAILSASPGEKVTMTCRASSSVSYMHWYQQKPGSSPKPWIYAPSNLASGVPARFSGSGSGTSYSLTISRVEAEDAATYYCQQWSFNPPTFGAGTKLELKSGSTSGSGKPGSGEGSQAYLQQSGAELVRPGASVKMSCKASGYTFTSYNMHWVKQTPRQGLEWIGAIYPGNGDTSYNQKFKGKATLTVDKSSSTAYMQLSSLTSEDSAVYFCARVVYYSNSYWYFDVWGTGTTVTVSEFPKPSTPPGSSGGAPKEFTLDFSTAKTYVDSLNVIRSAIGTPLQTISSGGTSLLMIDSGSGDNLFAVDVRGIDPEEGRFNNLRLIVERNNLYVTGFVNRTNNVFYRFADFSHVTFPGTTAVTLSGDSSYTTLQRVAGISRTGMQINRHSLTTSYLDLMSHSGTSLTQSVARAMLRFVTVTAEALRFRQIQRGFRTTLDDLSGRSYVMTAEDVDLTLNWGRLSSVLPDYHGQDSVRVGRISFGSINAILGSVALILNSHHHASRVARKDEL

SEQ ID NO: 226 - protein, 511 aa, Artificial Sequence
  source: /note="Description of Artificial Sequence: Synthetic polypeptide"
  source: /note="Multivalent CD20-binding molecule component 180"
QIVLSQSPAILSASPGEKVTMTCRASSSVSYMHWYQQKPGSSPKPWIYAPSNLASGVPARFSGSGSGTSYSLTISRVEAEDAATYYCQQWSFNPPTFGAGTKLELKSGGGGSGGGGSGGGGSGGGGSGGGGSQAYLQQSGAELVRPGASVKMSCKASGYTFTSYNMHWVKQTPRQGLEWIGAIYPGNGDTSYNQKFKGKATLTVDKSSSTAYMQLSSLTSEDSAVYFCARVVYYSNSYWYFDVWGTGTTVTVSGGGGSGGKEFTLDFSTAKTYVDSLNVIRSAIGTPLQTISSGGTSLLMIDSGSGDNLFAVDVRGIDPEEGRFNNLRLIVERNNLYVTGFVNRTNNVFYRFADFSHVTFPGTTAVTLSGDSSYTTLQRVAGISRTGMQINRHSLTTSYLDLMSHSGTSLTQSVARAMLRFVTVTAEALRFRQIQRGFRTTLDDLSGRSYVMTAEDVDLTLNWGRLSSVLPDYHGQDSVRVGRISFGSINAILGSVALILNSHHHASRVAR

SEQ ID NO: 227 - protein, 511 aa, Artificial Sequence
  source: /note="Description of Artificial Sequence: Synthetic polypeptide"
  source: /note="Multivalent CD20-binding molecule component 181"
QIVLSQSPAILSASPGEKVTMTCRASSSVSYMHWYQQKPGSSPKPWIYAPSNLASGVPARFSGSGSGTSYSLTISRVEAEDAATYYCQQWSFNPPTFGAGTKLELKSGGGGSGGGGSGGGGSGGGGSGGGGSQAYLQQSGAELVRPGASVKMSCKASGYTFTSYNMHWVKQTPRQGLEWIGAIYPGNGDTSYNQKFKGKATLTVDKSSSTAYMQLSSLTSEDSAVYFCARVVYYSNSYWYFDVWGTGTTVTVSGGGGSGGKEFTLDFSTAKTYVDSLNVIRSAIGTPLQTISSGGTSLLMIDSGTGDNLFAVDVRGIDPEEGRFNNLRLIVERNNLYVTGFVNRTNNVFYRFADFSHVTFPGTTAVTLSGDSSYTTLQRVAGISRTGMQINRHSLTTSYLDLMSHSGTSLTQSVARAMLRFVTVTAEALRFRQIQRGFRTTLDDLSGRSYVMTAEDVDLTLNWGRLSSVLPDYHGQDSVRVGRISFGSINAILGSVALILNSHHHASRVAR

SEQ ID NO: 228 - protein, 497 aa, Artificial Sequence
  source: /note="Description of Artificial Sequence: Synthetic polypeptide"
  source: /note="Multivalent CD20-binding molecule component 182"
QIVLSQSPAILSASPGEKVTMTCRASSSVSYMHWYQQKPGSSPKPWIYAPSNLASGVPARFSGSGSGTSYSLTISRVEAEDAATYYCQQWSFNPPTFGAGTKLELKSGSTSGSGKPGSGEGSQAYLQQSGAELVRPGASVKMSCKASGYTFTSYNMHWVKQTPRQGLEWIGAIYPGNGDTSYNQKFKGKATLTVDKSSSTAYMQLSSLTSEDSAVYFCARVVYYSNSYWYFDVWGTGTTVTVSGGGGSGGKEFTLDFSTAKTYVDSLNVIRSAIGTPLQTISSGGTSLLMIDSGSGDNLFAVDVRGIAPEEGRFNNLRLIVERNNLYVTGFVNRTNNVFYRFADFSHVTFPGTTAVTLSADSSYTTLQRVAGISRTGMQINRHSLTTSYLDLMSHSATSLTQSVARAMLRFVTVTAEALRFRQIQRGFRTTLDDLSGASYVMTAEDVDLTLNWGRLSSVLPDYHGQDSVRVGRISFGSINAILGSVALILNSHHHAS

SEQ ID NO: 229 - protein, 491 aa, Artificial Sequence
  source: /note="Description of Artificial Sequence: Synthetic polypeptide"
  source: /note="Multivalent CD20-binding molecule component 183"
QIVLSQSPAILSASPGEKVTMTCRASSSVSYMHWYQQKPGSSPKPWIYAPSNLASGVPARFSGSGSGTSYSLTISRVEAEDAATYYCQQWSFNPPTFGAGTKLELKSGGGGSQAYLQQSGAELVRPGASVKMSCKASGYTFTSYNMHWVKQTPRQGLEWIGAIYPGNGDTSYNQKFKGKATLTVDKSSSTAYMQLSSLTSEDSAVYFCARVVYYSNSYWYFDVWGTGTTVTVSGGGGSGGKEFTLDFSTAKTYVDSLNVIRSAIGTPLQTISSGGTSLLMIDNLVPMVATVVDVRGIDPEEGRFNNLRLIVERNNLYVTGFVNRTNNVFYRFADFSHVTFPGTTAVTLSGDSSYTTLQRVAGISRTGMQINRHSLTTSYLDLMSHSGTSLTQSVARAMLRFVTVTAEALRFRQIQRGFRTTLDDLSGRSYVMTAEDVDLTLNWGRLSSVLPDYHGQDSVRVGRISFGSINAILGSVALILNSHHHASRVAR

SEQ ID NO: 230 - protein, 506 aa, Artificial Sequence
  source: /note="Description of Artificial Sequence: Synthetic polypeptide"
  source: /note="Multivalent CD20-binding molecule component 184"
QIVLSQSPAILSASPGEKVTMTCRASSSVSYMHWYQQKPGSSPKPWIYAPSNLASGVPARFSGSGSGTSYSLTISRVEAEDAATYYCQQWSFNPPTFGAGTKLELKSGSTSGSGKPGSGEGSQAYLQQSGAELVRPGASVKMSCKASGYTFTSYNMHWVKQTPRQGLEWIGAIYPGNGDTSYNQKFKGKATLTVDKSSSTAYMQLSSLTSEDSAVYFCARVVYYSNSYWYFDVWGTGTTVTVSEFPKPSTPPGSSGGAPKEFTLDFSTAKTYVDSLNVIRSAIGTPLQTISSGGTSLLMIDSGSGDNLFAVDVRGIDPEEGRFNNLRLIVERNNLYVTGFVNRTNNVFYRFADFSHVTFPGTTAVTLSGDSSYTTLQRVAGISRTGMQINRHSLTTSYLDLMSHSGTSLTQSVARAMLRFVTVTAEALRFRQIQRGFRTTLDDLSGRSYVMTAEDVDLTLNWGRLSSVLPDYHGQDSVRVGRISFGSINAILGSVALILNSHHHAS

SEQ ID NO: 231 - protein, 510 aa, Artificial Sequence
  source: /note="Description of Artificial Sequence: Synthetic polypeptide"
  source: /note="Multivalent CD20-binding molecule component 185"
QAYLQQSGAELVRPGASVKMSCKASGYTFTSYNMHWVKQTPRQGLEWIGAIYPGNGDTSYNQKFKGKATLTVDKSSSTAYMQLSSLTSEDSAVYFCARVVYYSNSYWYFDVWGTGTTVTVSGSTSGSGKPGSGEGSQIVLSQSPAILSASPGEKVTMTCRASSSVSYMHWYQQKPGSSPKPWIYAPSNLASGVPARFSGSGSGTSYSLTISRVEAEDAATYYCQQWSFNPPTFGAGTKLELKSEFPKPSTPPGSSGGAPKEFTLDFSTAKTYVDSLNVIRSAIGTPLQTISSGGTSLLMIDSGSGDNLFAVDVRGIDPEEGRFNNLRLIVERNNLYVTGFVNRTNNVFYRFADFSHVTFPGTTAVTLSGDSSYTTLQRVAGISRTGMQINRHSLTTSYLDLMSHSGTSLTQSVARAMLRFVTVTAEALRFRQIQRGFRTTLDDLSGRSYVMTAEDVDLTLNWGRLSSVLPDYHGQDSVRVGRISFGSINAILGSVALILNSHHHASRVAR

SEQ ID NO: 232 - protein, 501 aa, Artificial Sequence; identical to SEQ ID NO: 103
  source: /note="Description of Artificial Sequence: Synthetic polypeptide"
  source: /note="Multivalent CD20-binding molecule component 186"

SEQ ID NO: 233 - protein, 501 aa, Artificial Sequence
  source: /note="Description of Artificial Sequence: Synthetic polypeptide"
  source: /note="Multivalent CD20-binding molecule component 187"
QAYLQQSGAELVRPGASVKMSCKASGYTFTSYNMHWVKQTPRQGLEWIGAIYPGNGDTSYNQKFKGKATLTVDKSSSTAYMQLSSLTSEDSAVYFCARVVYYSNSYWYFDVWGTGTTVTVSGSTSGSGKPGSGEGSQIVLSQSPAILSASPGEKVTMTCRASSSVSYMHWYQQKPGSSPKPWIYAPSNLASGVPARFSGSGSGTSYSLTISRVEAEDAATYYCQQWSFNPPTFGAGTKLELKSGGGGSGGKEFTLDFSTAKTYVDSLNVIRSAIGTPLQTISSGGTSLLMIDSGTGDNLFAVDVRGIDPEEGRFNNLRLIVERNNLYVTGFVNRTNNVFYRFADFSHVTFPGTTAVTLSGDSSYTTLQRVAGISRTGMQINRHSLTTSYLDLMSHSGTSLTQSVARAMLRFVTVTAEALRFRQIQRGFRTTLDDLSGRSYVMTAEDVDLTLNWGRLSSVLPDYHGQDSVRVGRISFGSINAILGSVALILNSHHHASRVAR

SEQ ID NO: 234 - protein, 491 aa, Artificial Sequence
  source: /note="Description of Artificial Sequence: Synthetic polypeptide"
  source: /note="Multivalent CD20-binding molecule component 188"
QAYLQQSGAELVRPGASVKMSCKASGYTFTSYNMHWVKQTPRQGLEWIGAIYPGNGDTSYNQKFKGKATLTVDKSSSTAYMQLSSLTSEDSAVYFCARVVYYSNSYWYFDVWGTGTTVTVSGGGGSQIVLSQSPAILSASPGEKVTMTCRASSSVSYMHWYQQKPGSSPKPWIYAPSNLASGVPARFSGSGSGTSYSLTISRVEAEDAATYYCQQWSFNPPTFGAGTKLELKSGGGGSGGKEFTLDFSTAKTYVDSLNVIRSAIGTPLQTISSGGTSLLMIDSGSGDNLFAVDVRGIAPEEGRFNNLRLIVERNNLYVTGFVNRTNNVFYRFADFSHVTFPGTTAVTLSADSSYTTLQRVAGISRTGMQINRHSLTTSYLDLMSHSATSLTQSVARAMLRFVTVTAEALRFRQIQRGFRTTLDDLSGASYVMTAEDVDLTLNWGRLSSVLPDYHGQDSVRVGRISFGSINAILGSVALILNSHHHASRVAR

SEQ ID NO: 235 - protein, 524 aa, Artificial Sequence
  source: /note="Description of Artificial Sequence: Synthetic polypeptide"
  source: /note="Multivalent CD20-binding molecule component 189"
QAYLQQSGAELVRPGASVKMSCKASGYTFTSYNMHWVKQTPRQGLEWIGAIYPGNGDTSYNQKFKGKATLTVDKSSSTAYMQLSSLTSEDSAVYFCARVVYYSNSYWYFDVWGTGTTVTVSGGGGSGGGGSGGGGSGGGGSGGGGSQIVLSQSPAILSASPGEKVTMTCRASSSVSYMHWYQQKPGSSPKPWIYAPSNLASGVPARFSGSGSGTSYSLTISRVEAEDAATYYCQQWSFNPPTFGAGTKLELKSEFPKPSTPPGSSGGAPKEFTLDFSTAKTYVDSLNVIRSAIGTPLQTISSGGTSLLMIDNLVPMVATVVDVRGIDPEEGRFNNLRLIVERNNLYVTGFVNRTNNVFYRFADFSHVTFPGTTAVTLSGDSSYTTLQRVAGISRTGMQINRHSLTTSYLDLMSHSGTSLTQSVARAMLRFVTVTAEALRFRQIQRGFRTTLDDLSGRSYVMTAEDVDLTLNWGRLSSVLPDYHGQDSVRVGRISFGSINAILGSVALILNSHHHASRVARKDEL

SEQ ID NO: 236 - protein, 491 aa, Artificial Sequence
  source: /note="Description of Artificial Sequence: Synthetic polypeptide"
  source: /note="Multivalent CD20-binding molecule component 190"
QAYLQQSGAELVRPGASVKMSCKASGYTFTSYNMHWVKQTPRQGLEWIGAIYPGNGDTSYNQKFKGKATLTVDKSSSTAYMQLSSLTSEDSAVYFCARVVYYSNSYWYFDVWGTGTTVTVSGGGGSQIVLSQSPAILSASPGEKVTMTCRASSSVSYMHWYQQKPGSSPKPWIYAPSNLASGVPARFSGSGSGTSYSLTISRVEAEDAATYYCQQWSFNPPTFGAGTKLELKSGGGGSGGKEFTLDFSTAKTYVDSLNVIRSAIGTPLQTISSGGTSLLMIDSGSGDNLFAVDVRGIDPEEGRFNNLRLIVERNNLYVTGFVNRTNNVFYRFADFSHVTFPGTTAVTLSGDSSYTTLQRVAGISRTGMQINRHSLTTSYLDLMSHSGTSLTQSVARAMLRFVTVTAEALRFRQIQRGFRTTLDDLSGRSYVMTAEDVDLTLNWGRLSSVLPDYHGQDSVRVGRISFGSINAILGSVALILNSHHHASAVAA

SEQ ID NO: 237 - protein, 513 aa, Artificial Sequence
  source: /note="Description of Artificial Sequence: Synthetic polypeptide"
  source: /note="Multivalent CD20-binding molecule component 191"
QVQLVQSGAEVKKPGSSVKVSCKASGYAFSYSWINWVRQAPGQGLEWMGRIFPGDGDTDYNGKFKGRVTITADKSTSTAYMELSSLRSEDTAVYYCARNVFDGYWLVYWGQGTLVTVSSGSTSGSGKPGSGEGSDIVMTQTPLSLPVTPGEPASISCRSSKSLLHSNGITYLYWYLQKPGQSPQLLIYQMSNLVSGVPDRFSGSGSGTDFTLKISRVEAEDVGVYYCAQNLELPYTFGGGTKVEIKEFPKPSTPPGSSGGAPKEFTLDFSTAKTYVDSLNVIRSAIGTPLQTISSGGTSLLMIDSGSGDNLFAVDVRGIDPEEGRFNNLRLIVERNNLYVTGFVNRTNNVFYRFADFSHVTFPGTTAVTLSGDSSYTTLQRVAGISRTGMQINRHSLTTSYLDLMSHSGTSLTQSVARAMLRFVTVTAEALRFRQIQRGFRTTLDDLSGRSYVMTAEDVDLTLNWGRLSSVLPDYHGQDSVRVGRISFGSINAILGSVALILNSHHHASRVAR

SEQ ID NO: 238 - protein, 522 aa, Artificial Sequence
  source: /note="Description of Artificial Sequence: Synthetic polypeptide"
  source: /note="Multivalent CD20-binding molecule component 192"
QVQLVQSGAEVKKPGSSVKVSCKASGYAFSYSWINWVRQAPGQGLEWMGRIFPGDGDTDYNGKFKGRVTITADKSTSTAYMELSSLRSEDTAVYYCARNVFDGYWLVYWGQGTLVTVSSGSTSGSGKPGSGEGSDIVMTQTPLSLPVTPGEPASISCRSSKSLLHSNGITYLYWYLQKPGQSPQLLIYQMSNLVSGVPDRFSGSGSGTDFTLKISRVEAEDVGVYYCAQNLELPYTFGGGTKVEIKEFPKPSTPPGSSGGAPGILGFVFTLKEFTLDFSTAKTYVDSLNVIRSAIGTPLQTISSGGTSLLMIDSGSGDNLFAVDVRGIDPEEGRFNNLRLIVERNNLYVTGFVNRTNNVFYRFADFSHVTFPGTTAVTLSGDSSYTTLQRVAGISRTGMQINRHSLTTSYLDLMSHSGTSLTQSVARAMLRFVTVTAEALRFRQIQRGFRTTLDDLSGRSYVMTAEDVDLTLNWGRLSSVLPDYHGQDSVRVGRISFGSINAILGSVALILNSHHHASRVAR

SEQ ID NO: 239 - protein, 512 aa, Artificial Sequence
  source: /note="Description of Artificial Sequence: Synthetic polypeptide"
  source: /note="Multivalent CD20-binding molecule component 193"
QVQLVQSGAEVKKPGSSVKVSCKASGYAFSYSWINWVRQAPGQGLEWMGRIFPGDGDTDYNGKFKGRVTITADKSTSTAYMELSSLRSEDTAVYYCARNVFDGYWLVYWGQGTLVTVSSGGGGSDIVMTQTPLSLPVTPGEPASISCRSSKSLLHSNGITYLYWYLQKPGQSPQLLIYQMSNLVSGVPDRFSGSGSGTDFTLKISRVEAEDVGVYYCAQNLELPYTFGGGTKVEIKEFPKPSTPPGSSGGAPGILGFVFTLKEFTLDFSTAKTYVDSLNVIRSAIGTPLQTISSGGTSLLMIDSGTGDNLFAVDVRGIDPEEGRFNNLRLIVERNNLYVTGFVNRTNNVFYRFADFSHVTFPGTTAVTLSGDSSYTTLQRVAGISRTGMQINRHSLTTSYLDLMSHSGTSLTQSVARAMLRFVTVTAEALRFRQIQRGFRTTLDDLSGRSYVMTAEDVDLTLNWGRLSSVLPDYHGQDSVRVGRISFGSINAILGSVALILNSHHHASRVAR

SEQ ID NO: 240 - protein, 508 aa, Artificial Sequence
  source: /note="Description of Artificial Sequence: Synthetic polypeptide"
  source: /note="Multivalent CD20-binding molecule component 194"
QVQLVQSGAEVKKPGSSVKVSCKASGYAFSYSWINWVRQAPGQGLEWMGRIFPGDGDTDYNGKFKGRVTITADKSTSTAYMELSSLRSEDTAVYYCARNVFDGYWLVYWGQGTLVTVSSGGGGSDIVMTQTPLSLPVTPGEPASISCRSSKSLLHSNGITYLYWYLQKPGQSPQLLIYQMSNLVSGVPDRFSGSGSGTDFTLKISRVEAEDVGVYYCAQNLELPYTFGGGTKVEIKEFPKPSTPPGSSGGAPGILGFVFTLKEFTLDFSTAKTYVDSLNVIRSAIGTPLQTISSGGTSLLMIDSGSGDNLFAVDVRGIAPEEGRFNNLRLIVERNNLYVTGFVNRTNNVFYRFADFSHVTFPGTTAVTLSADSSYTTLQRVAGISRTGMQINRHSLTTSYLDLMSHSATSLTQSVARAMLRFVTVTAEALRFRQIQRGFRTTLDDLSGASYVMTAEDVDLTLNWGRLSSVLPDYHGQDSVRVGRISFGSINAILGSVALILNSHHHAS

SEQ ID NO: 241 - protein, 503 aa, Artificial Sequence
  source: /note="Description of Artificial Sequence: Synthetic polypeptide"
  source: /note="Multivalent CD20-binding molecule component 195"
QVQLVQSGAEVKKPGSSVKVSCKASGYAFSYSWINWVRQAPGQGLEWMGRIFPGDGDTDYNGKFKGRVTITADKSTSTAYMELSSLRSEDTAVYYCARNVFDGYWLVYWGQGTLVTVSSGGGGSDIVMTQTPLSLPVTPGEPASISCRSSKSLLHSNGITYLYWYLQKPGQSPQLLIYQMSNLVSGVPDRFSGSGSGTDFTLKISRVEAEDVGVYYCAQNLELPYTFGGGTKVEIKEFPKPSTPPGSSGGAPKEFTLDFSTAKTYVDSLNVIRSAIGTPLQTISSGGTSLLMIDNLVPMVATVVDVRGIDPEEGRFNNLRLIVERNNLYVTGFVNRTNNVFYRFADFSHVTFPGTTAVTLSGDSSYTTLQRVAGISRTGMQINRHSLTTSYLDLMSHSGTSLTQSVARAMLRFVTVTAEALRFRQIQRGFRTTLDDLSGRSYVMTAEDVDLTLNWGRLSSVLPDYHGQDSVRVGRISFGSINAILGSVALILNSHHHASRVAR

SEQ ID NO: 242 - protein, 500 aa, Artificial Sequence
  source: /note="Description of Artificial Sequence: Synthetic polypeptide"
  source: /note="Multivalent CD20-binding molecule component 196"
QVQLVQSGAEVKKPGSSVKVSCKASGYAFSYSWINWVRQAPGQGLEWMGRIFPGDGDTDYNGKFKGRVTITADKSTSTAYMELSSLRSEDTAVYYCARNVFDGYWLVYWGQGTLVTVSSGSTSGSGKPGSGEGSDIVMTQTPLSLPVTPGEPASISCRSSKSLLHSNGITYLYWYLQKPGQSPQLLIYQMSNLVSGVPDRFSGSGSGTDFTLKISRVEAEDVGVYYCAQNLELPYTFGGGTKVEIKGGGGSGGKEFTLDFSTAKTYVDSLNVIRSAIGTPLQTISSGGTSLLMIDSGSGDNLFAVDVRGIDPEEGRFNNLRLIVERNNLYVTGFVNRTNNVFYRFADFSHVTFPGTTAVTLSGDSSYTTLQRVAGISRTGMQINRHSLTTSYLDLMSHSGTSLTQSVARAMLRFVTVTAEALRFRQIQRGFRTTLDDLSGRSYVMTAEDVDLTLNWGRLSSVLPDYHGQDSVRVGRISFGSINAILGSVALILNSHHHAS

SEQ ID NO: 243 - protein, 513 aa, Artificial Sequence
  source: /note="Description of Artificial Sequence: Synthetic polypeptide"
  source: /note="Multivalent CD20-binding molecule component 197"
DIVMTQTPLSLPVTPGEPASISCRSSKSLLHSNGITYLYWYLQKPGQSPQLLIYQMSNLVSGVPDRFSGSGSGTDFTLKISRVEAEDVGVYYCAQNLELPYTFGGGTKVEIKGSTSGSGKPGSGEGSQVQLVQSGAEVKKPGSSVKVSCKASGYAFSYSWINWVRQAPGQGLEWMGRIFPGDGDTDYNGKFKGRVTITADKSTSTAYMELSSLRSEDTAVYYCARNVFDGYWLVYWGQGTLVTVSSEFPKPSTPPGSSGGAPKEFTLDFSTAKTYVDSLNVIRSAIGTPLQTISSGGTSLLMIDSGSGDNLFAVDVRGIDPEEGRFNNLRLIVERNNLYVTGFVNRTNNVFYRFADFSHVTFPGTTAVTLSGDSSYTTLQRVAGISRTGMQINRHSLTTSYLDLMSHSGTSLTQSVARAMLRFVTVTAEALRFRQIQRGFRTTLDDLSGRSYVMTAEDVDLTLNWGRLSSVLPDYHGQDSVRVGRISFGSINAILGSVALILNSHHHASRVAR

SEQ ID NO: 244 - protein, 516 aa, Artificial Sequence
  source: /note="Description of Artificial Sequence: Synthetic polypeptide"
  source: /note="Multivalent CD20-binding molecule component 198"
DIVMTQTPLSLPVTPGEPASISCRSSKSLLHSNGITYLYWYLQKPGQSPQLLIYQMSNLVSGVPDRFSGSGSGTDFTLKISRVEAEDVGVYYCAQNLELPYTFGGGTKVEIKGGGGSQVQLVQSGAEVKKPGSSVKVSCKASGYAFSYSWINWVRQAPGQGLEWMGRIFPGDGDTDYNGKFKGRVTITADKSTSTAYMELSSLRSEDTAVYYCARNVFDGYWLVYWGQGTLVTVSSEFPKPSTPPGSSGGAPGILGFVFTLKEFTLDFSTAKTYVDSLNVIRSAIGTPLQTISSGGTSLLMIDSGSGDNLFAVDVRGIDPEEGRFNNLRLIVERNNLYVTGFVNRTNNVFYRFADFSHVTFPGTTAVTLSGDSSYTTLQRVAGISRTGMQINRHSLTTSYLDLMSHSGTSLTQSVARAMLRFVTVTAEALRFRQIQRGFRTTLDDLSGRSYVMTAEDVDLTLNWGRLSSVLPDYHGQDSVRVGRISFGSINAILGSVALILNSHHHASRVARKDEL

SEQ ID NO: 245 - protein, 522 aa, Artificial Sequence
  source: /note="Description of Artificial Sequence: Synthetic polypeptide"
  source: /note="Multivalent CD20-binding molecule component 199"
DIVMTQTPLSLPVTPGEPASISCRSSKSLLHSNGITYLYWYLQKPGQSPQLLIYQMSNLVSGVPDRFSGSGSGTDFTLKISRVEAEDVGVYYCAQNLELPYTFGGGTKVEIKGSTSGSGKPGSGEGSQVQLVQSGAEVKKPGSSVKVSCKASGYAFSYSWINWVRQAPGQGLEWMGRIFPGDGDTDYNGKFKGRVTITADKSTSTAYMELSSLRSEDTAVYYCARNVFDGYWLVYWGQGTLVTVSSEFPKPSTPPGSSGGAPGILGFVFTLKEFTLDFSTAKTYVDSLNVIRSAIGTPLQTISSGGTSLLMIDSGTGDNLFAVDVRGIDPEEGRFNNLRLIVERNNLYVTGFVNRTNNVFYRFADFSHVTFPGTTAVTLSGDSSYTTLQRVAGISRTGMQINRHSLTTSYLDLMSHSGTSLTQSVARAMLRFVTVTAEALRFRQIQRGFRTTLDDLSGRSYVMTAEDVDLTLNWGRLSSVLPDYHGQDSVRVGRISFGSINAILGSVALILNSHHHASRVAR

SEQ ID NO: 246 - protein, 522 aa, Artificial Sequence
  source: /note="Description of Artificial Sequence: Synthetic polypeptide"
  source: /note="Multivalent CD20-binding molecule component 200"
DIVMTQTPLSLPVTPGEPASISCRSSKSLLHSNGITYLYWYLQKPGQSPQLLIYQMSNLVSGVPDRFSGSGSGTDFTLKISRVEAEDVGVYYCAQNLELPYTFGGGTKVEIKGSTSGSGKPGSGEGSQVQLVQSGAEVKKPGSSVKVSCKASGYAFSYSWINWVRQAPGQGLEWMGRIFPGDGDTDYNGKFKGRVTITADKSTSTAYMELSSLRSEDTAVYYCARNVFDGYWLVYWGQGTLVTVSSEFPKPSTPPGSSGGAPGILGFVFTLKEFTLDFSTAKTYVDSLNVIRSAIGTPLQTISSGGTSLLMIDSGSGDNLFAVDVRGIAPEEGRFNNLRLIVERNNLYVTGFVNRTNNVFYRFADFSHVTFPGTTAVTLSADSSYTTLQRVAGISRTGMQINRHSLTTSYLDLMSHSATSLTQSVARAMLRFVTVTAEALRFRQIQRGFRTTLDDLSGASYVMTAEDVDLTLNWGRLSSVLPDYHGQDSVRVGRISFGSINAILGSVALILNSHHHASRVAR

SEQ ID NO: 247 - protein, 503 aa, Artificial Sequence
  source: /note="Description of Artificial Sequence: Synthetic polypeptide"
  source: /note="Multivalent CD20-binding molecule component 201"
DIVMTQTPLSLPVTPGEPASISCRSSKSLLHSNGITYLYWYLQKPGQSPQLLIYQMSNLVSGVPDRFSGSGSGTDFTLKISRVEAEDVGVYYCAQNLELPYTFGGGTKVEIKGGGGSQVQLVQSGAEVKKPGSSVKVSCKASGYAFSYSWINWVRQAPGQGLEWMGRIFPGDGDTDYNGKFKGRVTITADKSTSTAYMELSSLRSEDTAVYYCARNVFDGYWLVYWGQGTLVTVSSEFPKPSTPPGSSGGAPKEFTLDFSTAKTYVDSLNVIRSAIGTPLQTISSGGTSLLMIDNLVPMVATVVDVRGIDPEEGRFNNLRLIVERNNLYVTGFVNRTNNVFYRFADFSHVTFPGTTAVTLSGDSSYTTLQRVAGISRTGMQINRHSLTTSYLDLMSHSGTSLTQSVARAMLRFVTVTAEALRFRQIQRGFRTTLDDLSGRSYVMTAEDVDLTLNWGRLSSVLPDYHGQDSVRVGRISFGSINAILGSVALILNSHHHASRVAR

SEQ ID NO: 248 - protein, 514 aa, Artificial Sequence
  source: /note="Description of Artificial Sequence: Synthetic polypeptide"
  source: /note="Multivalent CD20-binding molecule component 202"
DIVMTQTPLSLPVTPGEPASISCRSSKSLLHSNGITYLYWYLQKPGQSPQLLIYQMSNLVSGVPDRFSGSGSGTDFTLKISRVEAEDVGVYYCAQNLELPYTFGGGTKVEIKGGGGSGGGGSGGGGSGGGGSGGGGSQVQLVQSGAEVKKPGSSVKVSCKASGYAFSYSWINWVRQAPGQGLEWMGRIFPGDGDTDYNGKFKGRVTITADKSTSTAYMELSSLRSEDTAVYYCARNVFDGYWLVYWGQGTLVTVSSGGGGSGGKEFTLDFSTAKTYVDSLNVIRSAIGTPLQTISSGGTSLLMIDSGSGDNLFAVDVRGIDPEEGRFNNLRLIVERNNLYVTGFVNRTNNVFYRFADFSHVTFPGTTAVTLSGDSSYTTLQRVAGISRTGMQINRHSLTTSYLDLMSHSGTSLTQSVARAMLRFVTVTAEALRFRQIQRGFRTTLDDLSGRSYVMTAEDVDLTLNWGRLSSVLPDYHGQDSVRVGRISFGSINAILGSVALILNSHHHASAVAA

SEQ ID NO: 249 - protein, 520 aa, Artificial Sequence
  source: /note="Description of Artificial Sequence: Synthetic polypeptide"
  source: /note="Multivalent CD20-binding molecule component 203"
KEFTLDFSTAKTYVDSLNVIRSAIGTPLQTISSGGTSLLMIDSGSGDNLFAVDVRGIDPEEGRFNNLRLIVERNNLYVTGFVNRTNNVFYRFADFSHVTFPGTTAVTLSGDSSYTTLQRVAGISRTGMQINRHSLTTSYLDLMSHSGTSLTQSVARAMLRFVTVTAEALRFRQIQRGFRTTLDDLSGRSYVMTAEDVDLTLNWGRLSSVLPDYHGQDSVRVGRISFGSINAILGSVALILNSHHHASRVAREFPKPSTPPGSSGGAPQAYLQQSGAELVRPGASVKMSCKASGYTFTSYNMHWVKQTPRQGLEWIGAIYPGNGDTSYNQKFKGKATLTVDKSSSTAYMQLSSLTSEDSAVYFCARVVYYSNSYWYFDVWGTGTTVTVSGGGGSGGGGSGGGGSGGGGSGGGGSQIVLSQSPAILSASPGEKVTMTCRASSSVSYMHWYQQKPGSSPKPWIYAPSNLASGVPARFSGSGSGTSYSLTISRVEAEDAATYYCQQWSFNPPTFGAGTKLELKS

SEQ ID NO: 250 - protein, 510 aa, Artificial Sequence
  source: /note="Description of Artificial Sequence: Synthetic polypeptide"
  source: /note="Multivalent CD20-binding molecule component 204"
KEFTLDFSTAKTYVDSLNVIRSAIGTPLQTISSGGTSLLMIDSGSGDNLFAVDVRGIDPEEGRFNNLRLIVERNNLYVTGFVNRTNNVFYRFADFSHVTFPGTTAVTLSGDSSYTTLQRVAGISRTGMQINRHSLTTSYLDLMSHSGTSLTQSVARAMLRFVTVTAEALRFRQIQRGFRTTLDDLSGRSYVMTAEDVDLTLNWGRLSSVLPDYHGQDSVRVGRISFGSINAILGSVALILNSHHHASRVAREFPKPSTPPGSSGGAPQAYLQQSGAELVRPGASVKMSCKASGYTFTSYNMHWVKQTPRQGLEWIGAIYPGNGDTSYNQKFKGKATLTVDKSSSTAYMQLSSLTSEDSAVYFCARVVYYSNSYWYFDVWGTGTTVTVSGSTSGSGKPGSGEGSQIVLSQSPAILSASPGEKVTMTCRASSSVSYMHWYQQKPGSSPKPWIYAPSNLASGVPARFSGSGSGTSYSLTISRVEAEDAATYYCQQWSFNPPTFGAGTKLELKS

SEQ ID NO: 251 - protein, 500 aa, Artificial Sequence
  source: /note="Description of Artificial Sequence: Synthetic polypeptide"
  source: /note="Multivalent CD20-binding molecule component 205"
KEFTLDFSTAKTYVDSLNVIRSAIGTPLQTISSGGTSLLMIDSGTGDNLFAVDVRGIAPEEGRFNNLRLIVERNNLYVTGFVNRTNNVFYRFADFSHVTFPGTTAVTLSADSSYTTLQRVAGISRTGMQINRHSLTTSYLDLMSHSATSLTQSVARAMLRFVTVTAEALRFRQIQRGFRTTLDDLSGASYVMTAEDVDLTLNWGRLSSVLPDYHGQDSVRVGRISFGSINAILGSVALILNSHHHASRVAREFPKPSTPPGSSGGAPQAYLQQSGAELVRPGASVKMSCKASGYTFTSYNMHWVKQTPRQGLEWIGAIYPGNGDTSYNQKFKGKATLTVDKSSSTAYMQLSSLTSEDSAVYFCARVVYYSNSYWYFDVWGTGTTVTVSGGGGSQIVLSQSPAILSASPGEKVTMTCRASSSVSYMHWYQQKPGSSPKPWIYAPSNLASGVPARFSGSGSGTSYSLTISRVEAEDAATYYCQQWSFNPPTFGAGTKLELKS

SEQ ID NO: 252 - protein, 511 aa, Artificial Sequence
  source: /note="Description of Artificial Sequence: Synthetic polypeptide"
  source: /note="Multivalent CD20-binding molecule component 206"
KEFTLDFSTAKTYVDSLNVIRSAIGTPLQTISSGGTSLLMIDSGSGDNLFAVDVRGIAPEEGRFNNLRLIVERNNLYVTGFVNRTNNVFYRFADFSHVTFPGTTAVTLSADSSYTTLQRVAGISRTGMQINRHSLTTSYLDLMSHSATSLTQSVARAMLRFVTVTAEALRFRQIQRGFRTTLDDLSGASYVMTAEDVDLTLNWGRLSSVLPDYHGQDSVRVGRISFGSINAILGSVALILNSHHHASRVARGGGGSGGQAYLQQSGAELVRPGASVKMSCKASGYTFTSYNMHWVKQTPRQGLEWIGAIYPGNGDTSYNQKFKGKATLTVDKSSSTAYMQLSSLTSEDSAVYFCARVVYYSNSYWYFDVWGTGTTVTVSGGGGSGGGGSGGGGSGGGGSGGGGSQIVLSQSPAILSASPGEKVTMTCRASSSVSYMHWYQQKPGSSPKPWIYAPSNLASGVPARFSGSGSGTSYSLTISRVEAEDAATYYCQQWSFNPPTFGAGTKLELKS

SEQ ID NO: 253 - protein, 501 aa, Artificial Sequence
  source: /note="Description of Artificial Sequence: Synthetic polypeptide"
  source: /note="Multivalent CD20-binding molecule component 207"
KEFTLDFSTAKTYVDSLNVIRSAIGTPLQTISSGGTSLLMIDNLVPMVATVVDVRGIDPEEGRFNNLRLIVERNNLYVTGFVNRTNNVFYRFADFSHVTFPGTTAVTLSGDSSYTTLQRVAGISRTGMQINRHSLTTSYLDLMSHSGTSLTQSVARAMLRFVTVTAEALRFRQIQRGFRTTLDDLSGRSYVMTAEDVDLTLNWGRLSSVLPDYHGQDSVRVGRISFGSINAILGSVALILNSHHHASRVARGGGGSGGQAYLQQSGAELVRPGASVKMSCKASGYTFTSYNMHWVKQTPRQGLEWIGAIYPGNGDTSYNQKFKGKATLTVDKSSSTAYMQLSSLTSEDSAVYFCARVVYYSNSYWYFDVWGTGTTVTVSGSTSGSGKPGSGEGSQIVLSQSPAILSASPGEKVTMTCRASSSVSYMHWYQQKPGSSPKPWIYAPSNLASGVPARFSGSGSGTSYSLTISRVEAEDAATYYCQQWSFNPPTFGAGTKLELKS

SEQ ID NO: 254 - protein, 521 aa, Artificial Sequence
  source: /note="Description of Artificial Sequence: Synthetic polypeptide"
  source: /note="Multivalent CD20-binding molecule component 208"
KEFTLDFSTAKTYVDSLNVIRSAIGTPLQTISSGGTSLLMIDSGSGDNLFAVDVRGIDPEEGRFNNLRLIVERNNLYVTGFVNRTNNVFYRFADFSHVTFPGTTAVTLSGDSSYTTLQRVAGISRTGMQINRHSLTTSYLDLMSHSGTSLTQSVARAMLRFVTVTAEALRFRQIQRGFRTTLDDLSGRSYVMTAEDVDLTLNWGRLSSVLPDYHGQDSVRVGRISFGSINAILGSVALILNSHHHASRVAREFPKPSTPPGSSGGAPQVQLQQPGAELVKPGASVKMSCKTSGYTFTSYNVHWVKQTPGQGLEWIGAIYPGNGDTSFNQKFKGKATLTADKSSSTVYMQLSSLTSEDSAVYYCARSNYYGSSYVWFFDVWGAGTTVTVSSGGGGSGGGGSGGGGSGGGGSGGGGSQIVLSQSPTILSASPGEKVTMTCRASSSVSYMDWYQQKPGSSPKPWIYATSNLASGVPARFSGSGSGTSYSLTISRVEAEDAATYYCQQWISNPPTFGAGTKLELK

SEQ ID NO: 255 - protein, 511 aa, Artificial Sequence
  source: /note="Description of Artificial Sequence: Synthetic polypeptide"
  source: /note="Multivalent CD20-binding molecule component 209"
KEFTLDFSTAKTYVDSLNVIRSAIGTPLQTISSGGTSLLMIDSGSGDNLFAVDVRGIDPEEGRFNNLRLIVERNNLYVTGFVNRTNNVFYRFADFSHVTFPGTTAVTLSGDSSYTTLQRVAGISRTGMQINRHSLTTSYLDLMSHSGTSLTQSVARAMLRFVTVTAEALRFRQIQRGFRTTLDDLSGRSYVMTAEDVDLTLNWGRLSSVLPDYHGQDSVRVGRISFGSINAILGSVALILNSHHHASRVAREFPKPSTPPGSSGGAPQVQLQQPGAELVKPGASVKMSCKTSGYTFTSYNVHWVKQTPGQGLEWIGAIYPGNGDTSFNQKFKGKATLTADKSSSTVYMQLSSLTSEDSAVYYCARSNYYGSSYVWFFDVWGAGTTVTVSSGSTSGSGKPGSGEGSQIVLSQSPTILSASPGEKVTMTCRASSSVSYMDWYQQKPGSSPKPWIYATSNLASGVPARFSGSGSGTSYSLTISRVEAEDAATYYCQQWISNPPTFGAGTKLELK

SEQ ID NO: 256 - protein, 501 aa, Artificial Sequence
  source: /note="Description of Artificial Sequence: Synthetic polypeptide"
  source: /note="Multivalent CD20-binding molecule component 210"
KEFTLDFSTAKTYVDSLNVIRSAIGTPLQTISSGGTSLLMIDSGSGDNLFAVDVRGIDPEEGRFNNLRLIVERNNLYVTGFVNRTNNVFYRFADFSHVTFPGTTAVTLSGDSSYTTLQRVAGISRTGMQINRHSLTTSYLDLMSHSGTSLTQSVARAMLRFVTVTAEALRFRQIQRGFRTTLDDLSGRSYVMTAEDVDLTLNWGRLSSVLPDYHGQDSVRVGRISFGSINAILGSVALILNSHHHASRVAREFPKPSTPPGSSGGAPQVQLQQPGAELVKPGASVKMSCKTSGYTFTSYNVHWVKQTPGQGLEWIGAIYPGNGDTSFNQKFKGKATLTADKSSSTVYMQLSSLTSEDSAVYYCARSNYYGSSYVWFFDVWGAGTTVTVSSGGGGSQIVLSQSPTILSASPGEKVTMTCRASSSVSYMDWYQQKPGSSPKPWIYATSNLASGVPARFSGSGSGTSYSLTISRVEAEDAATYYCQQWISNPPTFGAGTKLELK

SEQ ID NO: 257 - protein, 512 aa, Artificial Sequence
  source: /note="Description of Artificial Sequence: Synthetic polypeptide"
  source: /note="Multivalent CD20-binding molecule component 211"
KEFTLDFSTAKTYVDSLNVIRSAIGTPLQTISSGGTSLLMIDSGSGDNLFAVDVRGIDPEEGRFNNLRLIVERNNLYVTGFVNRTNNVFYRFADFSHVTFPGTTAVTLSGDSSYTTLQRVAGISRTGMQINRHSLTTSYLDLMSHSGTSLTQSVARAMLRFVTVTAEALRFRQIQRGFRTTLDDLSGRSYVMTAEDVDLTLNWGRLSSVLPDYHGQDSVRVGRISFGSINAILGSVALILNSHHHASRVARGGGGSGGQVQLQQPGAELVKPGASVKMSCKTSGYTFTSYNVHWVKQTPGQGLEWIGAIYPGNGDTSFNQKFKGKATLTADKSSSTVYMQLSSLTSEDSAVYYCARSNYYGSSYVWFFDVWGAGTTVTVSSGGGGSGGGGSGGGGSGGGGSGGGGSQIVLSQSPTILSASPGEKVTMTCRASSSVSYMDWYQQKPGSSPKPWIYATSNLASGVPARFSGSGSGTSYSLTISRVEAEDAATYYCQQWISNPPTFGAGTKLELK

SEQ ID NO: 258 - protein, 502 aa, Artificial Sequence
  source: /note="Description of Artificial Sequence: Synthetic polypeptide"
  source: /note="Multivalent CD20-binding molecule component 212"
KEFTLDFSTAKTYVDSLNVIRSAIGTPLQTISSGGTSLLMIDSGSGDNLFAVDVRGIDPEEGRFNNLRLIVERNNLYVTGFVNRTNNVFYRFADFSHVTFPGTTAVTLSGDSSYTTLQRVAGISRTGMQINRHSLTTSYLDLMSHSGTSLTQSVARAMLRFVTVTAEALRFRQIQRGFRTTLDDLSGRSYVMTAEDVDLTLNWGRLSSVLPDYHGQDSVRVGRISFGSINAILGSVALILNSHHHASRVARGGGGSGGQVQLQQPGAELVKPGASVKMSCKTSGYTFTSYNVHWVKQTPGQGLEWIGAIYPGNGDTSFNQKFKGKATLTADKSSSTVYMQLSSLTSEDSAVYYCARSNYYGSSYVWFFDVWGAGTTVTVSSGSTSGSGKPGSGEGSQIVLSQSPTILSASPGEKVTMTCRASSSVSYMDWYQQKPGSSPKPWIYATSNLASGVPARFSGSGSGTSYSLTISRVEAEDAATYYCQQWISNPPTFGAGTKLELK

SEQ ID NO: 259 - protein, 492 aa, Artificial Sequence
  source: /note="Description of Artificial Sequence: Synthetic polypeptide"
  source: /note="Multivalent CD20-binding molecule component 213"
KEFTLDFSTAKTYVDSLNVIRSAIGTPLQTISSGGTSLLMIDSGTGDNLFAVDVRGIDPEEGRFNNLRLIVERNNLYVTGFVNRTNNVFYRFADFSHVTFPGTTAVTLSGDSSYTTLQRVAGISRTGMQINRHSLTTSYLDLMSHSGTSLTQSVARAMLRFVTVTAEALRFRQIQRGFRTTLDDLSGRSYVMTAEDVDLTLNWGRLSSVLPDYHGQDSVRVGRISFGSINAILGSVALILNSHHHASRVARGGGGSGGQVQLQQPGAELVKPGASVKMSCKTSGYTFTSYNVHWVKQTPGQGLEWIGAIYPGNGDTSFNQKFKGKATLTADKSSSTVYMQLSSLTSEDSAVYYCARSNYYGSSYVWFFDVWGAGTTVTVSSGGGGSQIVLSQSPTILSASPGEKVTMTCRASSSVSYMDWYQQKPGSSPKPWIYATSNLASGVPARFSGSGSGTSYSLTISRVEAEDAATYYCQQWISNPPTFGAGTKLELK

SEQ ID NO: 260 - protein, 517 aa, Artificial Sequence
  source: /note="Description of Artificial Sequence: Synthetic polypeptide"
  source: /note="Multivalent CD20-binding molecule component 214"
KEFTLDFSTAKTYVDSLNVIRSAIGTPLQTISSGGTSLLMIDSGSGDNLFAVDVRGIAPEEGRFNNLRLIVERNNLYVTGFVNRTNNVFYRFADFSHVTFPGTTAVTLSADSSYTTLQRVAGISRTGMQINRHSLTTSYLDLMSHSATSLTQSVARAMLRFVTVTAEALRFRQIQRGFRTTLDDLSGASYVMTAEDVDLTLNWGRLSSVLPDYHGQDSVRVGRISFGSINAILGSVALILNSHHHASEFPKPSTPPGSSGGAPQVQLQQPGAELVKPGASVKMSCKTSGYTFTSYNVHWVKQTPGQGLEWIGAIYPGNGDTSFNQKFKGKATLTADKSSSTVYMQLSSLTSEDSAVYYCARSNYYGSSYVWFFDVWGAGTTVTVSSGGGGSGGGGSGGGGSGGGGSGGGGSQIVLSQSPTILSASPGEKVTMTCRASSSVSYMDWYQQKPGSSPKPWIYATSNLASGVPARFSGSGSGTSYSLTISRVEAEDAATYYCQQWISNPPTFGAGTKLELK

SEQ ID NO: 261 - protein, 511 aa, Artificial Sequence
  source: /note="Description of Artificial Sequence: Synthetic polypeptide"
  source: /note="Multivalent CD20-binding molecule component 215"
KEFTLDFSTAKTYVDSLNVIRSAIGTPLQTISSGGTSLLMIDNLVPMVATVVDVRGIDPEEGRFNNLRLIVERNNLYVTGFVNRTNNVFYRFADFSHVTFPGTTAVTLSGDSSYTTLQRVAGISRTGMQINRHSLTTSYLDLMSHSGTSLTQSVARAMLRFVTVTAEALRFRQIQRGFRTTLDDLSGRSYVMTAEDVDLTLNWGRLSSVLPDYHGQDSVRVGRISFGSINAILGSVALILNSHHHASRVAREFPKPSTPPGSSGGAPQVQLQQPGAELVKPGASVKMSCKTSGYTFTSYNVHWVKQTPGQGLEWIGAIYPGNGDTSFNQKFKGKATLTADKSSSTVYMQLSSLTSEDSAVYYCARSNYYGSSYVWFFDVWGAGTTVTVSSGSTSGSGKPGSGEGSQIVLSQSPTILSASPGEKVTMTCRASSSVSYMDWYQQKPGSSPKPWIYATSNLASGVPARFSGSGSGTSYSLTISRVEAEDAATYYCQQWISNPPTFGAGTKLELK

SEQ ID NO: 262 - protein, 524 aa, Artificial Sequence
  source: /note="Description of Artificial Sequence: Synthetic polypeptide"
  source: /note="Multivalent CD20-binding molecule component 216"
KEFTLDFSTAKTYVDSLNVIRSAIGTPLQTISSGGTSLLMIDSGSGDNLFAVDVRGIDPEEGRFNNLRLIVERNNLYVTGFVNRTNNVFYRFADFSHVTFPGTTAVTLSGDSSYTTLQRVAGISRTGMQINRHSLTTSYLDLMSHSGTSLTQSVARAMLRFVTVTAEALRFRQIQRGFRTTLDDLSGRSYVMTAEDVDLTLNWGRLSSVLPDYHGQDSVRVGRISFGSINAILGSVALILNSHHHASRVAREFPKPSTPPGSSGGAPQVQLQQPGAELVKPGASVKMSCKTSGYTFTSYNVHWVKQTPGQGLEWIGAIYPGNGDTSFNQKFKGKATLTADKSSSTVYMQLSSLTSEDSAVYYCARSNYYGSSYVWFFDVWGAGTTVTVSSGGGGSGGGGSGGGGSGGGGSGGGGSQIVLSQSPTILSASPGEKVTMTCRASSSVSYMDWYQQKPGSSPKPWIYATSNLASGVPARFSGSGSGTSYSLTISRVEAEDAATYYCQQWISNPPTFGAGTKLELKDEL

SEQ ID NO: 263 - protein, 514 aa, Artificial Sequence
  source: /note="Description of Artificial Sequence: Synthetic polypeptide"
  source: /note="Multivalent CD20-binding molecule component 217"
KEFTLDFSTAKTYVDSLNVIRSAIGTPLQTISSGGTSLLMIDSGSGDNLFAVDVRGIDPEEGRFNNLRLIVERNNLYVTGFVNRTNNVFYRFADFSHVTFPGTTAVTLSGDSSYTTLQRVAGISRTGMQINRHSLTTSYLDLMSHSGTSLTQSVARAMLRFVTVTAEALRFRQIQRGFRTTLDDLSGRSYVMTAEDVDLTLNWGRLSSVLPDYHGQDSVRVGRISFGSINAILGSVALILNSHHHASRVAREFPKPSTPPGSSGGAPQVQLQQPGAELVKPGASVKMSCKTSGYTFTSYNVHWVKQTPGQGLEWIGAIYPGNGDTSFNQKFKGKATLTADKSSSTVYMQLSSLTSEDSAVYYCARSNYYGSSYVWFFDVWGAGTTVTVSSGSTSGSGKPGSGEGSQIVLSQSPTILSASPGEKVTMTCRASSSVSYMDWYQQKPGSSPKPWIYATSNLASGVPARFSGSGSGTSYSLTISRVEAEDAATYYCQQWISNPPTFGAGTKLELKDEL

SEQ ID NO: 264 - protein, 504 aa, Artificial Sequence
  source: /note="Description of Artificial Sequence: Synthetic polypeptide"
  source: /note="Multivalent CD20-binding molecule component 218"
KEFTLDFSTAKTYVDSLNVIRSAIGTPLQTISSGGTSLLMIDSGSGDNLFAVDVRGIDPEEGRFNNLRLIVERNNLYVTGFVNRTNNVFYRFADFSHVTFPGTTAVTLSGDSSYTTLQRVAGISRTGMQINRHSLTTSYLDLMSHSGTSLTQSVARAMLRFVTVTAEALRFRQIQRGFRTTLDDLSGRSYVMTAEDVDLTLNWGRLSSVLPDYHGQDSVRVGRISFGSINAILGSVALILNSHHHASRVAREFPKPSTPPGSSGGAPQVQLQQPGAELVKPGASVKMSCKTSGYTFTSYNVHWVKQTPGQGLEWIGAIYPGNGDTSFNQKFKGKATLTADKSSSTVYMQLSSLTSEDSAVYYCARSNYYGSSYVWFFDVWGAGTTVTVSSGGGGSQIVLSQSPTILSASPGEKVTMTCRASSSVSYMDWYQQKPGSSPKPWIYATSNLASGVPARFSGSGSGTSYSLTISRVEAEDAATYYCQQWISNPPTFGAGTKLELKDEL

SEQ ID NO: 265 - protein, 515 aa, Artificial Sequence
  source: /note="Description of Artificial Sequence: Synthetic polypeptide"
  source: /note="Multivalent CD20-binding molecule component 219"
KEFTLDFSTAKTYVDSLNVIRSAIGTPLQTISSGGTSLLMIDSGSGDNLFAVDVRGIDPEEGRFNNLRLIVERNNLYVTGFVNRTNNVFYRFADFSHVTFPGTTAVTLSGDSSYTTLQRVAGISRTGMQINRHSLTTSYLDLMSHSGTSLTQSVARAMLRFVTVTAEALRFRQIQRGFRTTLDDLSGRSYVMTAEDVDLTLNWGRLSSVLPDYHGQDSVRVGRISFGSINAILGSVALILNSHHHASRVARGGGGSGGQVQLQQPGAELVKPGASVKMSCKTSGYTFTSYNVHWVKQTPGQGLEWIGAIYPGNGDTSFNQKFKGKATLTADKSSSTVYMQLSSLTSEDSAVYYCARSNYYGSSYVWFFDVWGAGTTVTVSSGGGGSGGGGSGGGGSGGGGSGGGGSQIVLSQSPTILSASPGEKVTMTCRASSSVSYMDWYQQKPGSSPKPWIYATSNLASGVPARFSGSGSGTSYSLTISRVEAEDAATYYCQQWISNPPTFGAGTKLELKDEL

SEQ ID NO: 266 - protein, 505 aa, Artificial Sequence
  source: /note="Description of Artificial Sequence: Synthetic polypeptide"
  source: /note="Multivalent CD20-binding molecule component 220"
KEFTLDFSTAKTYVDSLNVIRSAIGTPLQTISSGGTSLLMIDSGSGDNLFAVDVRGIDPEEGRFNNLRLIVERNNLYVTGFVNRTNNVFYRFADFSHVTFPGTTAVTLSGDSSYTTLQRVAGISRTGMQINRHSLTTSYLDLMSHSGTSLTQSVARAMLRFVTVTAEALRFRQIQRGFRTTLDDLSGRSYVMTAEDVDLTLNWGRLSSVLPDYHGQDSVRVGRISFGSINAILGSVALILNSHHHASRVARGGGGSGGQVQLQQPGAELVKPGASVKMSCKTSGYTFTSYNVHWVKQTPGQGLEWIGAIYPGNGDTSFNQKFKGKATLTADKSSSTVYMQLSSLTSEDSAVYYCARSNYYGSSYVWFFDVWGAGTTVTVSSGSTSGSGKPGSGEGSQIVLSQSPTILSASPGEKVTMTCRASSSVSYMDWYQQKPGSSPKPWIYATSNLASGVPARFSGSGSGTSYSLTISRVEAEDAATYYCQQWISNPPTFGAGTKLELKDEL

SEQ ID NO: 267 - protein, 495 aa, Artificial Sequence
  source: /note="Description of Artificial Sequence: Synthetic polypeptide"
  source: /note="Multivalent CD20-binding molecule component 221"
KEFTLDFSTAKTYVDSLNVIRSAIGTPLQTISSGGTSLLMIDSGTGDNLFAVDVRGIDPEEGRFNNLRLIVERNNLYVTGFVNRTNNVFYRFADFSHVTFPGTTAVTLSGDSSYTTLQRVAGISRTGMQINRHSLTTSYLDLMSHSGTSLTQSVARAMLRFVTVTAEALRFRQIQRGFRTTLDDLSGRSYVMTAEDVDLTLNWGRLSSVLPDYHGQDSVRVGRISFGSINAILGSVALILNSHHHASRVARGGGGSGGQVQLQQPGAELVKPGASVKMSCKTSGYTFTSYNVHWVKQTPGQGLEWIGAIYPGNGDTSFNQKFKGKATLTADKSSSTVYMQLSSLTSEDSAVYYCARSNYYGSSYVWFFDVWGAGTTVTVSSGGGGSQIVLSQSPTILSASPGEKVTMTCRASSSVSYMDWYQQKPGSSPKPWIYATSNLASGVPARFSGSGSGTSYSLTISRVEAEDAATYYCQQWISNPPTFGAGTKLELKDEL

SEQ ID NO: 268 - protein, 520 aa, Artificial Sequence
  source: /note="Description of Artificial Sequence: Synthetic polypeptide"
  source: /note="Multivalent CD20-binding molecule component 222"
KEFTLDFSTAKTYVDSLNVIRSAIGTPLQTISSGGTSLLMIDSGSGDNLFAVDVRGIAPEEGRFNNLRLIVERNNLYVTGFVNRTNNVFYRFADFSHVTFPGTTAVTLSADSSYTTLQRVAGISRTGMQINRHSLTTSYLDLMSHSATSLTQSVARAMLRFVTVTAEALRFRQIQRGFRTTLDDLSGASYVMTAEDVDLTLNWGRLSSVLPDYHGQDSVRVGRISFGSINAILGSVALILNSHHHASEFPKPSTPPGSSGGAPQVQLQQPGAELVKPGASVKMSCKTSGYTFTSYNVHWVKQTPGQGLEWIGAIYPGNGDTSFNQKFKGKATLTADKSSSTVYMQLSSLTSEDSAVYYCARSNYYGSSYVWFFDVWGAGTTVTVSSGGGGSGGGGSGGGGSGGGGSGGGGSQIVLSQSPTILSASPGEKVTMTCRASSSVSYMDWYQQKPGSSPKPWIYATSNLASGVPARFSGSGSGTSYSLTISRVEAEDAATYYCQQWISNPPTFGAGTKLELKDEL

SEQ ID NO: 269 - protein, 514 aa, Artificial Sequence
  source: /note="Description of Artificial Sequence: Synthetic polypeptide"
  source: /note="Multivalent CD20-binding molecule component 223"
KEFTLDFSTAKTYVDSLNVIRSAIGTPLQTISSGGTSLLMIDNLVPMVATVVDVRGIDPEEGRFNNLRLIVERNNLYVTGFVNRTNNVFYRFADFSHVTFPGTTAVTLSGDSSYTTLQRVAGISRTGMQINRHSLTTSYLDLMSHSGTSLTQSVARAMLRFVTVTAEALRFRQIQRGFRTTLDDLSGRSYVMTAEDVDLTLNWGRLSSVLPDYHGQDSVRVGRISFGSINAILGSVALILNSHHHASRVAREFPKPSTPPGSSGGAPQVQLQQPGAELVKPGASVKMSCKTSGYTFTSYNVHWVKQTPGQGLEWIGAIYPGNGDTSFNQKFKGKATLTADKSSSTVYMQLSSLTSEDSAVYYCARSNYYGSSYVWFFDVWGAGTTVTVSSGSTSGSGKPGSGEGSQIVLSQSPTILSASPGEKVTMTCRASSSVSYMDWYQQKPGSSPKPWIYATSNLASGVPARFSGSGSGTSYSLTISRVEAEDAATYYCQQWISNPPTFGAGTKLELKDEL

SEQ ID NO: 270 - protein, 513 aa, Artificial Sequence
  source: /note="Description of Artificial Sequence: Synthetic polypeptide"
  source: /note="Multivalent CD20-binding molecule component 224"
KEFTLDFSTAKTYVDSLNVIRSAIGTPLQTISSGGTSLLMIDSGSGDNLFAVDVRGIDPEEGRFNNLRLIVERNNLYVTGFVNRTNNVFYRFADFSHVTFPGTTAVTLSGDSSYTTLQRVAGISRTGMQINRHSLTTSYLDLMSHSGTSLTQSVARAMLRFVTVTAEALRFRQIQRGFRTTLDDLSGRSYVMTAEDVDLTLNWGRLSSVLPDYHGQDSVRVGRISFGSINAILGSVALILNSHHHASRVAREFPKPSTPPGSSGGAPQVQLVQSGAEVKKPGSSVKVSCKASGYAFSYSWINWVRQAPGQGLEWMGRIFPGDGDTDYNGKFKGRVTITADKSTSTAYMELSSLRSEDTAVYYCARNVFDGYWLVYWGQGTLVTVSSGSTSGSGKPGSGEGSDIVMTQTPLSLPVTPGEPASISCRSSKSLLHSNGITYLYWYLQKPGQSPQLLIYQMSNLVSGVPDRFSGSGSGTDFTLKISRVEAEDVGVYYCAQNLELPYTFGGGTKVEIK

SEQ ID NO: 271 - protein, 497 aa, Artificial Sequence
  source: /note="Description of Artificial Sequence: Synthetic polypeptide"
  source: /note="Multivalent CD20-binding molecule component 225"
KEFTLDFSTAKTYVDSLNVIRSAIGTPLQTISSGGTSLLMIDSGSGDNLFAVDVRGIDPEEGRFNNLRLIVERNNLYVTGFVNRTNNVFYRFADFSHVTFPGTTAVTLSGDSSYTTLQRVAGISRTGMQINRHSLTTSYLDLMSHSGTSLTQSVARAMLRFVTVTAEALRFRQIQRGFRTTLDDLSGRSYVMTAEDVDLTLNWGRLSSVLPDYHGQDSVRVGRISFGSINAILGSVALILNSHHHASRVARGGGGSGGQVQLVQSGAEVKKPGSSVKVSCKASGYAFSYSWINWVRQAPGQGLEWMGRIFPGDGDTDYNGKFKGRVTITADKSTSTAYMELSSLRSEDTAVYYCARNVFDGYWLVYWGQGTLVTVSSGGGGSDIVMTQTPLSLPVTPGEPASISCRSSKSLLHSNGITYLYWYLQKPGQSPQLLIYQMSNLVSGVPDRFSGSGSGTDFTLKISRVEAEDVGVYYCAQNLELPYTFGGGTKVEIKDEL

SEQ ID NO: 272 - protein, 523 aa, Artificial Sequence
  source: /note="Description of Artificial Sequence: Synthetic polypeptide"
  source: /note="Multivalent CD20-binding molecule component 226"
KEFTLDFSTAKTYVDSLNVIRSAIGTPLQTISSGGTSLLMIDSGTGDNLFAVDVRGIDPEEGRFNNLRLIVERNNLYVTGFVNRTNNVFYRFADFSHVTFPGTTAVTLSGDSSYTTLQRVAGISRTGMQINRHSLTTSYLDLMSHSGTSLTQSVARAMLRFVTVTAEALRFRQIQRGFRTTLDDLSGRSYVMTAEDVDLTLNWGRLSSVLPDYHGQDSVRVGRISFGSINAILGSVALILNSHHHASRVAREFPKPSTPPGSSGGAPQVQLVQSGAEVKKPGSSVKVSCKASGYAFSYSWINWVRQAPGQGLEWMGRIFPGDGDTDYNGKFKGRVTITADKSTSTAYMELSSLRSEDTAVYYCARNVFDGYWLVYWGQGTLVTVSSGGGGSGGGGSGGGGSGGGGSGGGGSDIVMTQTPLSLPVTPGEPASISCRSSKSLLHSNGITYLYWYLQKPGQSPQLLIYQMSNLVSGVPDRFSGSGSGTDFTLKISRVEAEDVGVYYCAQNLELPYTFGGGTKVEIK

SEQ ID NO: 273 - protein, 503 aa, Artificial Sequence
  source: /note="Description of Artificial Sequence: Synthetic polypeptide"
  source: /note="Multivalent CD20-binding molecule component 227"
KEFTLDFSTAKTYVDSLNVIRSAIGTPLQTISSGGTSLLMIDSGSGDNLFAVDVRGIAPEEGRFNNLRLIVERNNLYVTGFVNRTNNVFYRFADFSHVTFPGTTAVTLSADSSYTTLQRVAGISRTGMQINRHSLTTSYLDLMSHSATSLTQSVARAMLRFVTVTAEALRFRQIQRGFRTTLDDLSGASYVMTAEDVDLTLNWGRLSSVLPDYHGQDSVRVGRISFGSINAILGSVALILNSHHHASRVAREFPKPSTPPGSSGGAPQVQLVQSGAEVKKPGSSVKVSCKASGYAFSYSWINWVRQAPGQGLEWMGRIFPGDGDTDYNGKFKGRVTITADKSTSTAYMELSSLRSEDTAVYYCARNVFDGYWLVYWGQGTLVTVSSGGGGSDIVMTQTPLSLPVTPGEPASISCRSSKSLLHSNGITYLYWYLQKPGQSPQLLIYQMSNLVSGVPDRFSGSGSGTDFTLKISRVEAEDVGVYYCAQNLELPYTFGGGTKVEIK

SEQ ID NO: 274 - protein, 516 aa, Artificial Sequence
  source: /note="Description of Artificial Sequence: Synthetic polypeptide"
  source: /note="Multivalent CD20-binding molecule component 228"
KEFTLDFSTAKTYVDSLNVIRSAIGTPLQTISSGGTSLLMIDNLVPMVATVVDVRGIDPEEGRFNNLRLIVERNNLYVTGFVNRTNNVFYRFADFSHVTFPGTTAVTLSGDSSYTTLQRVAGISRTGMQINRHSLTTSYLDLMSHSGTSLTQSVARAMLRFVTVTAEALRFRQIQRGFRTTLDDLSGRSYVMTAEDVDLTLNWGRLSSVLPDYHGQDSVRVGRISFGSINAILGSVALILNSHHHASRVAREFPKPSTPPGSSGGAPQVQLVQSGAEVKKPGSSVKVSCKASGYAFSYSWINWVRQAPGQGLEWMGRIFPGDGDTDYNGKFKGRVTITADKSTSTAYMELSSLRSEDTAVYYCARNVFDGYWLVYWGQGTLVTVSSGSTSGSGKPGSGEGSDIVMTQTPLSLPVTPGEPASISCRSSKSLLHSNGITYLYWYLQKPGQSPQLLIYQMSNLVSGVPDRFSGSGSGTDFTLKISRVEAEDVGVYYCAQNLELPYTFGGGTKVEIKDEL

SEQ ID NO: 275 - protein, 513 aa, Artificial Sequence
  source: /note="Description of Artificial Sequence: Synthetic polypeptide"
  source: /note="Multivalent CD20-binding molecule component 229"
KEFTLDFSTAKTYVDSLNVIRSAIGTPLQTISSGGTSLLMIDSGSGDNLFAVDVRGIDPEEGRFNNLRLIVERNNLYVTGFVNRTNNVFYRFADFSHVTFPGTTAVTLSGDSSYTTLQRVAGISRTGMQINRHSLTTSYLDLMSHSGTSLTQSVARAMLRFVTVTAEALRFRQIQRGFRTTLDDLSGRSYVMTAEDVDLTLNWGRLSSVLPDYHGQDSVRVGRISFGSINAILGSVALILNSHHHASRVAREFPKPSTPPGSSGGAPDIVMTQTPLSLPVTPGEPASISCRSSKSLLHSNGITYLYWYLQKPGQSPQLLIYQMSNLVSGVPDRFSGSGSGTDFTLKISRVEAEDVGVYYCAQNLELPYTFGGGTKVEIKGSTSGSGKPGSGEGSQVQLVQSGAEVKKPGSSVKVSCKASGYAFSYSWINWVRQAPGQGLEWMGRIFPGDGDTDYNGKFKGRVTITADKSTSTAYMELSSLRSEDTAVYYCARNVFDGYWLVYWGQGTLVTVSS

SEQ ID NO: 276 - protein, 514 aa, Artificial Sequence
  source: /note="Description of Artificial Sequence: Synthetic polypeptide"
  source: /note="Multivalent CD20-binding molecule component 230"
KEFTLDFSTAKTYVDSLNVIRSAIGTPLQTISSGGTSLLMIDSGSGDNLFAVDVRGIDPEEGRFNNLRLIVERNNLYVTGFVNRTNNVFYRFADFSHVTFPGTTAVTLSGDSSYTTLQRVAGISRTGMQINRHSLTTSYLDLMSHSGTSLTQSVARAMLRFVTVTAEALRFRQIQRGFRTTLDDLSGRSYVMTAEDVDLTLNWGRLSSVLPDYHGQDSVRVGRISFGSINAILGSVALILNSHHHASRVARGGGGSGGDIVMTQTPLSLPVTPGEPASISCRSSKSLLHSNGITYLYWYLQKPGQSPQLLIYQMSNLVSGVPDRFSGSGSGTDFTLKISRVEAEDVGVYYCAQNLELPYTFGGGTKVEIKGGGGSGGGGSGGGGSGGGGSGGGGSQVQLVQSGAEVKKPGSSVKVSCKASGYAFSYSWINWVRQAPGQGLEWMGRIFPGDGDTDYNGKFKGRVTITADKSTSTAYMELSSLRSEDTAVYYCARNVFDGYWLVYWGQGTLVTVSS

SEQ ID NO: 277 - protein, 494 aa, Artificial Sequence
  source: /note="Description of Artificial Sequence: Synthetic polypeptide"
  source: /note="Multivalent CD20-binding molecule component 231"
KEFTLDFSTAKTYVDSLNVIRSAIGTPLQTISSGGTSLLMIDSGTGDNLFAVDVRGIDPEEGRFNNLRLIVERNNLYVTGFVNRTNNVFYRFADFSHVTFPGTTAVTLSGDSSYTTLQRVAGISRTGMQINRHSLTTSYLDLMSHSGTSLTQSVARAMLRFVTVTAEALRFRQIQRGFRTTLDDLSGRSYVMTAEDVDLTLNWGRLSSVLPDYHGQDSVRVGRISFGSINAILGSVALILNSHHHASRVARGGGGSGGDIVMTQTPLSLPVTPGEPASISCRSSKSLLHSNGITYLYWYLQKPGQSPQLLIYQMSNLVSGVPDRFSGSGSGTDFTLKISRVEAEDVGVYYCAQNLELPYTFGGGTKVEIKGGGGSQVQLVQSGAEVKKPGSSVKVSCKASGYAFSYSWINWVRQAPGQGLEWMGRIFPGDGDTDYNGKFKGRVTITADKSTSTAYMELSSLRSEDTAVYYCARNVFDGYWLVYWGQGTLVTVSS

SEQ ID NO: 278 - protein, 509 aa, Artificial Sequence
  source: /note="Description of Artificial Sequence: Synthetic polypeptide"
  source: /note="Multivalent CD20-binding molecule component 232"
KEFTLDFSTAKTYVDSLNVIRSAIGTPLQTISSGGTSLLMIDSGSGDNLFAVDVRGIAPEEGRFNNLRLIVERNNLYVTGFVNRTNNVFYRFADFSHVTFPGTTAVTLSADSSYTTLQRVAGISRTGMQINRHSLTTSYLDLMSHSATSLTQSVARAMLRFVTVTAEALRFRQIQRGFRTTLDDLSGASYVMTAEDVDLTLNWGRLSSVLPDYHGQDSVRVGRISFGSINAILGSVALILNSHHHASEFPKPSTPPGSSGGAPDIVMTQTPLSLPVTPGEPASISCRSSKSLLHSNGITYLYWYLQKPGQSPQLLIYQMSNLVSGVPDRFSGSGSGTDFTLKISRVEAEDVGVYYCAQNLELPYTFGGGTKVEIKGSTSGSGKPGSGEGSQVQLVQSGAEVKKPGSSVKVSCKASGYAFSYSWINWVRQAPGQGLEWMGRIFPGDGDTDYNGKFKGRVTITADKSTSTAYMELSSLRSEDTAVYYCARNVFDGYWLVYWGQGTLVTVSS

SEQ ID NO: 279 - protein, 513 aa, Artificial Sequence
  source: /note="Description of Artificial Sequence: Synthetic polypeptide"
  source: /note="Multivalent CD20-binding molecule component 233"
KEFTLDFSTAKTYVDSLNVIRSAIGTPLQTISSGGTSLLMIDNLVPMVATVVDVRGIDPEEGRFNNLRLIVERNNLYVTGFVNRTNNVFYRFADFSHVTFPGTTAVTLSGDSSYTTLQRVAGISRTGMQINRHSLTTSYLDLMSHSGTSLTQSVARAMLRFVTVTAEALRFRQIQRGFRTTLDDLSGRSYVMTAEDVDLTLNWGRLSSVLPDYHGQDSVRVGRISFGSINAILGSVALILNSHHHASRVAREFPKPSTPPGSSGGAPDIVMTQTPLSLPVTPGEPASISCRSSKSLLHSNGITYLYWYLQKPGQSPQLLIYQMSNLVSGVPDRFSGSGSGTDFTLKISRVEAEDVGVYYCAQNLELPYTFGGGTKVEIKGSTSGSGKPGSGEGSQVQLVQSGAEVKKPGSSVKVSCKASGYAFSYSWINWVRQAPGQGLEWMGRIFPGDGDTDYNGKFKGRVTITADKSTSTAYMELSSLRSEDTAVYYCARNVFDGYWLVYWGQGTLVTVSS

SEQ ID NO: 280 - protein, 509 aa, Artificial Sequence
  source: /note="Description of Artificial Sequence: Synthetic polypeptide"
  source: /note="Multivalent CD20-binding molecule component 234"
KEFTLDFSTAKTYVDSLNVIRSAIGTPLQTISSGGTSLLMIDSGSGDNLFAVDVRGIDPEEGRFNNLRLIVERNNLYVTGFVNRTNNVFYRFADFSHVTFPGTTAVTLSGDSSYTTLQRVAGISRTGMQINRHSLTTSYLDLMSHSGTSLTQSVARAMLRFVTVTAEALRFRQIQRGFRTTLDDLSGRSYVMTAEDVDLTLNWGRLSSVLPDYHGQDSVRVGRISFGSINAILGSVALILNSHHHASEFPKPSTPPGSSGGAPDIVMTQTPLSLPVTPGEPASISCRSSKSLLHSNGITYLYWYLQKPGQSPQLLIYQMSNLVSGVPDRFSGSGSGTDFTLKISRVEAEDVGVYYCAQNLELPYTFGGGTKVEIKGSTSGSGKPGSGEGSQVQLVQSGAEVKKPGSSVKVSCKASGYAFSYSWINWVRQAPGQGLEWMGRIFPGDGDTDYNGKFKGRVTITADKSTSTAYMELSSLRSEDTAVYYCARNVFDGYWLVYWGQGTLVTVSS

SEQ ID NO: 281 - protein, 510 aa, Artificial Sequence
  source: /note="Description of Artificial Sequence: Synthetic polypeptide"
  source: /note="Multivalent CD20-binding molecule component 235"
KEFTLDFSTAKTYVDSLNVIRSAIGTPLQTISSGGTSLLMIDSGSGDNLFAVDVRGIDPEEGRFNNLRLIVERNNLYVTGFVNRTNNVFYRFADFSHVTFPGTTAVTLSGDSSYTTLQRVAGISRTGMQINRHSLTTSYLDLMSHSGTSLTQSVARAMLRFVTVTAEALRFRQIQRGFRTTLDDLSGRSYVMTAEDVDLTLNWGRLSSVLPDYHGQDSVRVGRISFGSINAILGSVALILNSHHHASRVAREFPKPSTPPGSSGGAPQIVLSQSPAILSASPGEKVTMTCRASSSVSYMHWYQQKPGSSPKPWIYAPSNLASGVPARFSGSGSGTSYSLTISRVEAEDAATYYCQQWSFNPPTFGAGTKLELKSGSTSGSGKPGSGEGSQAYLQQSGAELVRPGASVKMSCKASGYTFTSYNMHWVKQTPRQGLEWIGAIYPGNGDTSYNQKFKGKATLTVDKSSSTAYMQLSSLTSEDSAVYFCARVVYYSNSYWYFDVWGTGTTVTVS

SEQ ID NO: 282 - protein, 500 aa, Artificial Sequence
  source: /note="Description of Artificial Sequence: Synthetic polypeptide"
  source: /note="Multivalent CD20-binding molecule component 236"
KEFTLDFSTAKTYVDSLNVIRSAIGTPLQTISSGGTSLLMIDSGSGDNLFAVDVRGIDPEEGRFNNLRLIVERNNLYVTGFVNRTNNVFYRFADFSHVTFPGTTAVTLSGDSSYTTLQRVAGISRTGMQINRHSLTTSYLDLMSHSGTSLTQSVARAMLRFVTVTAEALRFRQIQRGFRTTLDDLSGRSYVMTAEDVDLTLNWGRLSSVLPDYHGQDSVRVGRISFGSINAILGSVALILNSHHHASRVAREFPKPSTPPGSSGGAPQIVLSQSPAILSASPGEKVTMTCRASSSVSYMHWYQQKPGSSPKPWIYAPSNLASGVPARFSGSGSGTSYSLTISRVEAEDAATYYCQQWSFNPPTFGAGTKLELKSGGGGSQAYLQQSGAELVRPGASVKMSCKASGYTFTSYNMHWVKQTPRQGLEWIGAIYPGNGDTSYNQKFKGKATLTVDKSSSTAYMQLSSLTSEDSAVYFCARVVYYSNSYWYFDVWGTGTTVTVS

SEQ ID NO: 283 - protein, 510 aa, Artificial Sequence
  source: /note="Description of Artificial Sequence: Synthetic polypeptide"
  source: /note="Multivalent CD20-binding molecule component 237"
KEFTLDFSTAKTYVDSLNVIRSAIGTPLQTISSGGTSLLMIDSGTGDNLFAVDVRGIDPEEGRFNNLRLIVERNNLYVTGFVNRTNNVFYRFADFSHVTFPGTTAVTLSGDSSYTTLQRVAGISRTGMQINRHSLTTSYLDLMSHSGTSLTQSVARAMLRFVTVTAEALRFRQIQRGFRTTLDDLSGRSYVMTAEDVDLTLNWGRLSSVLPDYHGQDSVRVGRISFGSINAILGSVALILNSHHHASRVAREFPKPSTPPGSSGGAPQIVLSQSPAILSASPGEKVTMTCRASSSVSYMHWYQQKPGSSPKPWIYAPSNLASGVPARFSGSGSGTSYSLTISRVEAEDAATYYCQQWSFNPPTFGAGTKLELKSGSTSGSGKPGSGEGSQAYLQQSGAELVRPGASVKMSCKASGYTFTSYNMHWVKQTPRQGLEWIGAIYPGNGDTSYNQKFKGKATLTVDKSSSTAYMQLSSLTSEDSAVYFCARVVYYSNSYWYFDVWGTGTTVTVS

SEQ ID NO: 284 - protein, 510 aa, Artificial Sequence
  source: /note="Description of Artificial Sequence: Synthetic polypeptide"
  source: /note="Multivalent CD20-binding molecule component 238"
KEFTLDFSTAKTYVDSLNVIRSAIGTPLQTISSGGTSLLMIDSGSGDNLFAVDVRGIAPEEGRFNNLRLIVERNNLYVTGFVNRTNNVFYRFADFSHVTFPGTTAVTLSADSSYTTLQRVAGISRTGMQINRHSLTTSYLDLMSHSATSLTQSVARAMLRFVTVTAEALRFRQIQRGFRTTLDDLSGASYVMTAEDVDLTLNWGRLSSVLPDYHGQDSVRVGRISFGSINAILGSVALILNSHHHASRVAREFPKPSTPPGSSGGAPQIVLSQSPAILSASPGEKVTMTCRASSSVSYMHWYQQKPGSSPKPWIYAPSNLASGVPARFSGSGSGTSYSLTISRVEAEDAATYYCQQWSFNPPTFGAGTKLELKSGSTSGSGKPGSGEGSQAYLQQSGAELVRPGASVKMSCKASGYTFTSYNMHWVKQTPRQGLEWIGAIYPGNGDTSYNQKFKGKATLTVDKSSSTAYMQLSSLTSEDSAVYFCARVVYYSNSYWYFDVWGTGTTVTVS

SEQ ID NO: 285 - protein, 511 aa, Artificial Sequence
  source: /note="Description of Artificial Sequence: Synthetic polypeptide"
  source: /note="Multivalent CD20-binding molecule component 239"
KEFTLDFSTAKTYVDSLNVIRSAIGTPLQTISSGGTSLLMIDNLVPMVATVVDVRGIDPEEGRFNNLRLIVERNNLYVTGFVNRTNNVFYRFADFSHVTFPGTTAVTLSGDSSYTTLQRVAGISRTGMQINRHSLTTSYLDLMSHSGTSLTQSVARAMLRFVTVTAEALRFRQIQRGFRTTLDDLSGRSYVMTAEDVDLTLNWGRLSSVLPDYHGQDSVRVGRISFGSINAILGSVALILNSHHHASRVARGGGGSGGQIVLSQSPAILSASPGEKVTMTCRASSSVSYMHWYQQKPGSSPKPWIYAPSNLASGVPARFSGSGSGTSYSLTISRVEAEDAATYYCQQWSFNPPTFGAGTKLELKSGGGGSGGGGSGGGGSGGGGSGGGGSQAYLQQSGAELVRPGASVKMSCKASGYTFTSYNMHWVKQTPRQGLEWIGAIYPGNGDTSYNQKFKGKATLTVDKSSSTAYMQLSSLTSEDSAVYFCARVVYYSNSYWYFDVWGTGTTVTVS

SEQ ID NO: 286 - protein, 510 aa, Artificial Sequence
  source: /note="Description of Artificial Sequence: Synthetic polypeptide"
  source: /note="Multivalent CD20-binding molecule component 240"
KEFTLDFSTAKTYVDSLNVIRSAIGTPLQTISSGGTSLLMIDSGSGDNLFAVDVRGIDPEEGRFNNLRLIVERNNLYVTGFVNRTNNVFYRFADFSHVTFPGTTAVTLSGDSSYTTLQRVAGISRTGMQINRHSLTTSYLDLMSHSGTSLTQSVARAMLRFVTVTAEALRFRQIQRGFRTTLDDLSGRSYVMTAEDVDLTLNWGRLSSVLPDYHGQDSVRVGRISFGSINAILGSVALILNSHHHASAVAAEFPKPSTPPGSSGGAPQIVLSQSPAILSASPGEKVTMTCRASSSVSYMHWYQQKPGSSPKPWIYAPSNLASGVPARFSGSGSGTSYSLTISRVEAEDAATYYCQQWSFNPPTFGAGTKLELKSGSTSGSGKPGSGEGSQAYLQQSGAELVRPGASVKMSCKASGYTFTSYNMHWVKQTPRQGLEWIGAIYPGNGDTSYNQKFKGKATLTVDKSSSTAYMQLSSLTSEDSAVYFCARVVYYSNSYWYFDVWGTGTTVTVS

SEQ ID NO: 287 - protein, 515 aa, Artificial Sequence
  source: /note="Description of Artificial Sequence: Synthetic polypeptide"
  source: /note="Multivalent CD20-binding molecule component 241"
KEFTLDFSTAKTYVDSLNVIRSAIGTPLQTISSGGTSLLMIDSGSGDNLFAVDVRGIDPEEGRFNNLRLIVERNNLYVTGFVNRTNNVFYRFADFSHVTFPGTTAVTLSGDSSYTTLQRVAGISRTGMQINRHSLTTSYLDLMSHSGTSLTQSVARAMLRFVTVTAEALRFRQIQRGFRTTLDDLSGRSYVMTAEDVDLTLNWGRLSSVLPDYHGQDSVRVGRISFGSINAILGSVALILNSHHHASRVAREFPKPSTPPGSSGGAPEIVLTQSPATLSLSPGERATLSCRASQSVSSYLAWYQQKPGQAPRLLIYDASNRATGIPARFSGSGSGTDFTLTISSLEPEDFAVYYCQQRSNWPITFGQGTRLEIKGSTSGSGKPGSGEGSEVQLVESGGGLVQPGRSLRLSCAASGFTFNDYAMHWVRQAPGKGLEWVSTISWNSGSIGYADSVKGRFTISRDNAKKSLYLQMNSLRAEDTALYYCAKDIQYGNYYYGMDVWGQGTTVTVSSKDEL

SEQ ID NO: 288 - protein, 512 aa, Artificial Sequence
  source: /note="Description of Artificial Sequence: Synthetic polypeptide"
  source: /note="Multivalent CD20-binding molecule component 242"
KEFTLDFSTAKTYVDSLNVIRSAIGTPLQTISSGGTSLLMIDSGSGDNLFAVDVRGIDPEEGRFNNLRLIVERNNLYVTGFVNRTNNVFYRFADFSHVTFPGTTAVTLSGDSSYTTLQRVAGISRTGMQINRHSLTTSYLDLMSHSGTSLTQSVARAMLRFVTVTAEALRFRQIQRGFRTTLDDLSGRSYVMTAEDVDLTLNWGRLSSVLPDYHGQDSVRVGRISFGSINAILGSVALILNSHHHASRVARGGGGSGGEIVLTQSPATLSLSPGERATLSCRASQSVSSYLAWYQQKPGQAPRLLIYDASNRATGIPARFSGSGSGTDFTLTISSLEPEDFAVYYCQQRSNWPITFGQGTRLEIKGGGGSGGGGSGGGGSGGGGSGGGGSEVQLVESGGGLVQPGRSLRLSCAASGFTFNDYAMHWVRQAPGKGLEWVSTISWNSGSIGYADSVKGRFTISRDNAKKSLYLQMNSLRAEDTALYYCAKDIQYGNYYYGMDVWGQGTTVTVSS

SEQ ID NO: 289 - protein, 512 aa, Artificial Sequence
  source: /note="Description of Artificial Sequence: Synthetic polypeptide"
  source: /note="Multivalent CD20-binding molecule component 243"
KEFTLDFSTAKTYVDSLNVIRSAIGTPLQTISSGGTSLLMIDSGTGDNLFAVDVRGIDPEEGRFNNLRLIVERNNLYVTGFVNRTNNVFYRFADFSHVTFPGTTAVTLSGDSSYTTLQRVAGISRTGMQINRHSLTTSYLDLMSHSGTSLTQSVARAMLRFVTVTAEALRFRQIQRGFRTTLDDLSGRSYVMTAEDVDLTLNWGRLSSVLPDYHGQDSVRVGRISFGSINAILGSVALILNSHHHASRVARGGGGSGGEIVLTQSPATLSLSPGERATLSCRASQSVSSYLAWYQQKPGQAPRLLIYDASNRATGIPARFSGSGSGTDFTLTISSLEPEDFAVYYCQQRSNWPITFGQGTRLEIKGGGGSGGGGSGGGGSGGGGSGGGGSEVQLVESGGGLVQPGRSLRLSCAASGFTFNDYAMHWVRQAPGKGLEWVSTISWNSGSIGYADSVKGRFTISRDNAKKSLYLQMNSLRAEDTALYYCAKDIQYGNYYYGMDVWGQGTTVTVSS

SEQ ID NO: 290 - protein, 498 aa, Artificial Sequence
  source: /note="Description of Artificial Sequence: Synthetic polypeptide"
  source: /note="Multivalent CD20-binding molecule component 244"
KEFTLDFSTAKTYVDSLNVIRSAIGTPLQTISSGGTSLLMIDSGSGDNLFAVDVRGIAPEEGRFNNLRLIVERNNLYVTGFVNRTNNVFYRFADFSHVTFPGTTAVTLSADSSYTTLQRVAGISRTGMQINRHSLTTSYLDLMSHSATSLTQSVARAMLRFVTVTAEALRFRQIQRGFRTTLDDLSGASYVMTAEDVDLTLNWGRLSSVLPDYHGQDSVRVGRISFGSINAILGSVALILNSHHHASGGGGSGGEIVLTQSPATLSLSPGERATLSCRASQSVSSYLAWYQQKPGQAPRLLIYDASNRATGIPARFSGSGSGTDFTLTISSLEPEDFAVYYCQQRSNWPITFGQGTRLEIKGSTSGSGKPGSGEGSEVQLVESGGGLVQPGRSLRLSCAASGFTFNDYAMHWVRQAPGKGLEWVSTISWNSGSIGYADSVKGRFTISRDNAKKSLYLQMNSLRAEDTALYYCAKDIQYGNYYYGMDVWGQGTTVTVSS

SEQ ID NO: 291 - protein, 492 aa, Artificial Sequence
  source: /note="Description of Artificial Sequence: Synthetic polypeptide"
  source: /note="Multivalent CD20-binding molecule component 245"
KEFTLDFSTAKTYVDSLNVIRSAIGTPLQTISSGGTSLLMIDNLVPMVATVVDVRGIDPEEGRFNNLRLIVERNNLYVTGFVNRTNNVFYRFADFSHVTFPGTTAVTLSGDSSYTTLQRVAGISRTGMQINRHSLTTSYLDLMSHSGTSLTQSVARAMLRFVTVTAEALRFRQIQRGFRTTLDDLSGRSYVMTAEDVDLTLNWGRLSSVLPDYHGQDSVRVGRISFGSINAILGSVALILNSHHHASRVARGGGGSGGEIVLTQSPATLSLSPGERATLSCRASQSVSSYLAWYQQKPGQAPRLLIYDASNRATGIPARFSGSGSGTDFTLTISSLEPEDFAVYYCQQRSNWPITFGQGTRLEIKGGGGSEVQLVESGGGLVQPGRSLRLSCAASGFTFNDYAMHWVRQAPGKGLEWVSTISWNSGSIGYADSVKGRFTISRDNAKKSLYLQMNSLRAEDTALYYCAKDIQYGNYYYGMDVWGQGTTVTVSS

SEQ ID NO: 292 - protein, 507 aa, Artificial Sequence
  source: /note="Description of Artificial Sequence: Synthetic polypeptide"
  source: /note="Multivalent CD20-binding molecule component 246"
KEFTLDFSTAKTYVDSLNVIRSAIGTPLQTISSGGTSLLMIDSGSGDNLFAVDVRGIDPEEGRFNNLRLIVERNNLYVTGFVNRTNNVFYRFADFSHVTFPGTTAVTLSGDSSYTTLQRVAGISRTGMQINRHSLTTSYLDLMSHSGTSLTQSVARAMLRFVTVTAEALRFRQIQRGFRTTLDDLSGRSYVMTAEDVDLTLNWGRLSSVLPDYHGQDSVRVGRISFGSINAILGSVALILNSHHHASEFPKPSTPPGSSGGAPEIVLTQSPATLSLSPGERATLSCRASQSVSSYLAWYQQKPGQAPRLLIYDASNRATGIPARFSGSGSGTDFTLTISSLEPEDFAVYYCQQRSNWPITFGQGTRLEIKGSTSGSGKPGSGEGSEVQLVESGGGLVQPGRSLRLSCAASGFTFNDYAMHWVRQAPGKGLEWVSTISWNSGSIGYADSVKGRFTISRDNAKKSLYLQMNSLRAEDTALYYCAKDIQYGNYYYGMDVWGQGTTVTVSS

SEQ ID NO: 293 - protein, 512 aa, Artificial Sequence
  source: /note="Description of Artificial Sequence: Synthetic polypeptide"
  source: /note="Multivalent CD20-binding molecule component 247"
KEFTLDFSTAKTYVDSLNVIRSAIGTPLQTISSGGTSLLMIDSGSGDNLFAVDVRGIDPEEGRFNNLRLIVERNNLYVTGFVNRTNNVFYRFADFSHVTFPGTTAVTLSGDSSYTTLQRVAGISRTGMQINRHSLTTSYLDLMSHSGTSLTQSVARAMLRFVTVTAEALRFRQIQRGFRTTLDDLSGRSYVMTAEDVDLTLNWGRLSSVLPDYHGQDSVRVGRISFGSINAILGSVALILNSHHHASRVAREFPKPSTPPGSSGGAPQVQLQQPGAELVKPGASVKMSCKASGYTFTSYNMHWVKQTPGRGLEWIGAIYPGNGDTSYNQKFKGKATLTADKSSSTAYMQLSSLTSEDSAVYYCARSTYYGGDWYFNVWGAGTTVTVSAGSTSGSGKPGSGEGSTKGQIVLSQSPAILSASPGEKVTMTCRASSSVSYIHWFQQKPGSSPKPWIYATSNLASGVPVRFSGSGSGTSYSLTISRVEAEDAATYYCQQWTSNPPTFGGGTKLEIK

SEQ ID NO: 294 - protein, 503 aa, Artificial Sequence; identical to SEQ ID NO: 165
  source: /note="Description of Artificial Sequence: Synthetic polypeptide"
  source: /note="Multivalent CD20-binding molecule component 248"

SEQ ID NO: 295 - protein, 503 aa, Artificial Sequence
  source: /note="Description of Artificial Sequence: Synthetic polypeptide"
  source: /note="Multivalent CD20-binding molecule component 249"
KEFTLDFSTAKTYVDSLNVIRSAIGTPLQTISSGGTSLLMIDSGTGDNLFAVDVRGIDPEEGRFNNLRLIVERNNLYVTGFVNRTNNVFYRFADFSHVTFPGTTAVTLSGDSSYTTLQRVAGISRTGMQINRHSLTTSYLDLMSHSGTSLTQSVARAMLRFVTVTAEALRFRQIQRGFRTTLDDLSGRSYVMTAEDVDLTLNWGRLSSVLPDYHGQDSVRVGRISFGSINAILGSVALILNSHHHASRVARGGGGSGGQVQLQQPGAELVKPGASVKMSCKASGYTFTSYNMHWVKQTPGRGLEWIGAIYPGNGDTSYNQKFKGKATLTADKSSSTAYMQLSSLTSEDSAVYYCARSTYYGGDWYFNVWGAGTTVTVSAGSTSGSGKPGSGEGSTKGQIVLSQSPAILSASPGEKVTMTCRASSSVSYIHWFQQKPGSSPKPWIYATSNLASGVPVRFSGSGSGTSYSLTISRVEAEDAATYYCQQWTSNPPTFGGGTKLEIK

SEQ ID NO: 296 - protein, 493 aa, Artificial Sequence
  source: /note="Description of Artificial Sequence: Synthetic polypeptide"
  source: /note="Multivalent CD20-binding molecule component 250"
KEFTLDFSTAKTYVDSLNVIRSAIGTPLQTISSGGTSLLMIDSGSGDNLFAVDVRGIAPEEGRFNNLRLIVERNNLYVTGFVNRTNNVFYRFADFSHVTFPGTTAVTLSADSSYTTLQRVAGISRTGMQINRHSLTTSYLDLMSHSATSLTQSVARAMLRFVTVTAEALRFRQIQRGFRTTLDDLSGASYVMTAEDVDLTLNWGRLSSVLPDYHGQDSVRVGRISFGSINAILGSVALILNSHHHASRVARGGGGSGGQVQLQQPGAELVKPGASVKMSCKASGYTFTSYNMHWVKQTPGRGLEWIGAIYPGNGDTSYNQKFKGKATLTADKSSSTAYMQLSSLTSEDSAVYYCARSTYYGGDWYFNVWGAGTTVTVSAGGGGSTKGQIVLSQSPAILSASPGEKVTMTCRASSSVSYIHWFQQKPGSSPKPWIYATSNLASGVPVRFSGSGSGTSYSLTISRVEAEDAATYYCQQWTSNPPTFGGGTKLEIK

SEQ ID NO: 297 - protein, 525 aa, Artificial Sequence
  source: /note="Description of Artificial Sequence: Synthetic polypeptide"
  source: /note="Multivalent CD20-binding molecule component 251"
KEFTLDFSTAKTYVDSLNVIRSAIGTPLQTISSGGTSLLMIDNLVPMVATVVDVRGIDPEEGRFNNLRLIVERNNLYVTGFVNRTNNVFYRFADFSHVTFPGTTAVTLSGDSSYTTLQRVAGISRTGMQINRHSLTTSYLDLMSHSGTSLTQSVARAMLRFVTVTAEALRFRQIQRGFRTTLDDLSGRSYVMTAEDVDLTLNWGRLSSVLPDYHGQDSVRVGRISFGSINAILGSVALILNSHHHASRVAREFPKPSTPPGSSGGAPQVQLQQPGAELVKPGASVKMSCKASGYTFTSYNMHWVKQTPGRGLEWIGAIYPGNGDTSYNQKFKGKATLTADKSSSTAYMQLSSLTSEDSAVYYCARSTYYGGDWYFNVWGAGTTVTVSAGGGGSGGGGSGGGGSGGGGSGGGGSTKGQIVLSQSPAILSASPGEKVTMTCRASSSVSYIHWFQQKPGSSPKPWIYATSNLASGVPVRFSGSGSGTSYSLTISRVEAEDAATYYCQQWTSNPPTFGGGTKLEIKDEL

SEQ ID NO: 298 - protein, 493 aa, Artificial Sequence
  source: /note="Description of Artificial Sequence: Synthetic polypeptide"
  source: /note="Multivalent CD20-binding molecule component 252"
KEFTLDFSTAKTYVDSLNVIRSAIGTPLQTISSGGTSLLMIDSGSGDNLFAVDVRGIDPEEGRFNNLRLIVERNNLYVTGFVNRTNNVFYRFADFSHVTFPGTTAVTLSGDSSYTTLQRVAGISRTGMQINRHSLTTSYLDLMSHSGTSLTQSVARAMLRFVTVTAEALRFRQIQRGFRTTLDDLSGRSYVMTAEDVDLTLNWGRLSSVLPDYHGQDSVRVGRISFGSINAILGSVALILNSHHHASAVAAGGGGSGGQVQLQQPGAELVKPGASVKMSCKASGYTFTSYNMHWVKQTPGRGLEWIGAIYPGNGDTSYNQKFKGKATLTADKSSSTAYMQLSSLTSEDSAVYYCARSTYYGGDWYFNVWGAGTTVTVSAGGGGSTKGQIVLSQSPAILSASPGEKVTMTCRASSSVSYIHWFQQKPGSSPKPWIYATSNLASGVPVRFSGSGSGTSYSLTISRVEAEDAATYYCQQWTSNPPTFGGGTKLEIK

SEQ ID NO: 299 - protein, 509 aa, Artificial Sequence
  source: /note="Description of Artificial Sequence: Synthetic polypeptide"
  source: /note="Multivalent CD20-binding molecule component 253"
KEFTLDFSTAKTYVDSLNVIRSAIGTPLQTISSGGTSLLMIDSGSGDNLFAVDVRGIDPEEGRFNNLRLIVERNNLYVTGFVNRTNNVFYRFADFSHVTFPGTTAVTLSGDSSYTTLQRVAGISRTGMQINRHSLTTSYLDLMSHSGTSLTQSVARAMLRFVTVTAEALRFRQIQRGFRTTLDDLSGRSYVMTAEDVDLTLNWGRLSSVLPDYHGQDSVRVGRISFGSINAILGSVALILNSHHHASRVAREFPKPSTPPGSSGGAPQVQLVQSGAELVKPGASVKMSCKASGYTFTSYNMHWVKQTPGQGLEWIGAIYPGNGDTSYNQKFKGKATLTADKSSSTAYMQLSSLTSEDSAVYYCARAQLRPNYWYFDVWGAGTTVTVSSGSTSGSGKPGSGEGSDIVLSQSPAILSASPGEKVTMTCRASSSVSYMHWYQQKPGSSPKPWIYATSNLASGVPARFSGSGSGTSYSLTISRVEAEDAATYYCQQWISNPPTFGAGTKLELK

SEQ ID NO: 300 - protein, 499 aa, Artificial Sequence
  source: /note="Description of Artificial Sequence: Synthetic polypeptide"
  source: /note="Multivalent CD20-binding molecule component 254"
KEFTLDFSTAKTYVDSLNVIRSAIGTPLQTISSGGTSLLMIDNLVPMVATVVDVRGIDPEEGRFNNLRLIVERNNLYVTGFVNRTNNVFYRFADFSHVTFPGTTAVTLSGDSSYTTLQRVAGISRTGMQINRHSLTTSYLDLMSHSGTSLTQSVARAMLRFVTVTAEALRFRQIQRGFRTTLDDLSGRSYVMTAEDVDLTLNWGRLSSVLPDYHGQDSVRVGRISFGSINAILGSVALILNSHHHASRVAREFPKPSTPPGSSGGAPQVQLVQSGAELVKPGASVKMSCKASGYTFTSYNMHWVKQTPGQGLEWIGAIYPGNGDTSYNQKFKGKATLTADKSSSTAYMQLSSLTSEDSAVYYCARAQLRPNYWYFDVWGAGTTVTVSSGGGGSDIVLSQSPAILSASPGEKVTMTCRASSSVSYMHWYQQKPGSSPKPWIYATSNLASGVPARFSGSGSGTSYSLTISRVEAEDAATYYCQQWISNPPTFGAGTKLELK

SEQ ID NO: 301 - protein, 496 aa, Artificial Sequence
  source: /note="Description of Artificial Sequence: Synthetic polypeptide"
  source: /note="Multivalent CD20-binding molecule component 255"
KEFTLDFSTAKTYVDSLNVIRSAIGTPLQTISSGGTSLLMIDSGSGDNLFAVDVRGIDPEEGRFNNLRLIVERNNLYVTGFVNRTNNVFYRFADFSHVTFPGTTAVTLSGDSSYTTLQRVAGISRTGMQINRHSLTTSYLDLMSHSGTSLTQSVARAMLRFVTVTAEALRFRQIQRGFRTTLDDLSGRSYVMTAEDVDLTLNWGRLSSVLPDYHGQDSVRVGRISFGSINAILGSVALILNSHHHASGGGGSGGQVQLVQSGAELVKPGASVKMSCKASGYTFTSYNMHWVKQTPGQGLEWIGAIYPGNGDTSYNQKFKGKATLTADKSSSTAYMQLSSLTSEDSAVYYCARAQLRPNYWYFDVWGAGTTVTVSSGSTSGSGKPGSGEGSDIVLSQSPAILSASPGEKVTMTCRASSSVSYMHWYQQKPGSSPKPWIYATSNLASGVPARFSGSGSGTSYSLTISRVEAEDAATYYCQQWISNPPTFGAGTKLELK

SEQ ID NO: 302 - protein, 512 aa, Artificial Sequence; identical to SEQ ID NO: 293
  source: /note="Description of Artificial Sequence: Synthetic polypeptide"
  source: /note="Multivalent CD20-binding molecule component 256"

SEQ ID NO: 303 - protein, 502 aa, Artificial Sequence
  source: /note="Description of Artificial Sequence: Synthetic polypeptide"
  source: /note="Multivalent CD20-binding molecule component 257"
KEFTLDFSTAKTYVDSLNVIRSAIGTPLQTISSGGTSLLMIDNLVPMVATVVDVRGIDPEEGRFNNLRLIVERNNLYVTGFVNRTNNVFYRFADFSHVTFPGTTAVTLSGDSSYTTLQRVAGISRTGMQINRHSLTTSYLDLMSHSGTSLTQSVARAMLRFVTVTAEALRFRQIQRGFRTTLDDLSGRSYVMTAEDVDLTLNWGRLSSVLPDYHGQDSVRVGRISFGSINAILGSVALILNSHHHASRVAREFPKPSTPPGSSGGAPQVQLQQPGAELVKPGASVKMSCKASGYTFTSYNMHWVKQTPGRGLEWIGAIYPGNGDTSYNQKFKGKATLTADKSSSTAYMQLSSLTSEDSAVYYCARSTYYGGDWYFNVWGAGTTVTVSAGGGGSTKGQIVLSQSPAILSASPGEKVTMTCRASSSVSYIHWFQQKPGSSPKPWIYATSNLASGVPVRFSGSGSGTSYSLTISRVEAEDAATYYCQQWTSNPPTFGGGTKLEIK

SEQ ID NO: 304 - protein, 492 aa, Artificial Sequence
  source: /note="Description of Artificial Sequence: Synthetic polypeptide"
  source: /note="Multivalent CD20-binding molecule component 258"
KEFTLDFSTAKTYVDSLNVIRSAIGTPLQTISSGGTSLLMIDSGSGDNLFAVDVRGIDPEEGRFNNLRLIVERNNLYVTGFVNRTNNVFYRFADFSHVTFPGTTAVTLSGDSSYTTLQRVAGISRTGMQINRHSLTTSYLDLMSHSGTSLTQSVARAMLRFVTVTAEALRFRQIQRGFRTTLDDLSGRSYVMTAEDVDLTLNWGRLSSVLPDYHGQDSVRVGRISFGSINAILGSVALILNSHHHASAVAAGGGGSGGQVQLQQPGAELVKPGASVKMSCKASGYTFTSYNMHWVKQTPGRGLEWIGAIYPGNGDTSYNQKFKGKATLTADKSSSTAYMQLSSLTSEDSAVYYCARSTYYGGDWYFNVWGAGTTVTVSAGGGGSGGGGSGGGGSGGGGSGGGGSTKGQIVLSQSPAILSASPGEKVTMTCRASSSVSYIHWFQQKPGSSPKPWIYATSNLASGVPVRFSGSGSGTSYSLTISRVEAEDKDEL
